(19) United States
(12) Patent Application Publication
(10) Pub. No.: US 2025/0115927 A1
(43) Pub. Date: Apr. 10, 2025

(54) METHODS FOR CLONAL PLANT PRODUCTION

(71) Applicant: PIONEER HI-BRED INTERNATIONAL, INC., JOHNSTON, IA (US)

(72) Inventors: WILLIAM JAMES GORDON-KAMM, URBANDALE, IA (US); KEITH S. LOWE, JOHNSTON, IA (US); JON AARON TUCKER REINDERS, CLIVE, IA (US); HUAXUN YE, JOHNSTON, IA (US)

(73) Assignee: PIONEER HI-BRED INTERNATIONAL, INC., JOHNSTON, IA (US)

(21) Appl. No.: 18/909,405

(22) Filed: Oct. 8, 2024

Related U.S. Application Data
(63) Continuation of application No. 17/437,791, filed on Sep. 9, 2021, now Pat. No. 12,146,147.
(60) Provisional application No. 62/816,580, filed on Mar. 11, 2019.

(51) Int. Cl. C12N 15/82; C07K 14/415

(52) U.S. Cl. CPC C12N 15/8267; C07K 14/415; C12N 15/8213; C12N 15/8216

(57) ABSTRACT

The methods disclosed herein provide for clonal plant production using a morphogenic gene to produce non-transgenic and transgenic plants wherein the morphogenic gene does not integrate into the genome of the plant.

### CROSS-REFERENCE TO RELATED APPLICATIONS

[0001] This application is a continuation of U.S. application Ser. No. 17/437,791, filed Sep. 9, 2021, which is a 371 National Stage Entry of PCT Application No. PCT/US2020/021844, filed Mar. 10, 2020, which in turn claims priority to U.S. Provisional Application No. 62/816,580, filed Mar. 11, 2019, each of which is incorporated by reference herein in their entireties.

### FIELD OF THE DISCLOSURE

[0002] The present disclosure relates generally to the field of plant molecular biology, including plant tissue culture methods. More specifically, the present disclosure pertains to rapid, highly efficient methods for clonal haploid plant propagation and micropropagation of recalcitrant plant species useful for plant breeding.

### REFERENCE TO A SEQUENCE LISTING SUBMITTED ELECTRONICALLY

[0003] The official copy of the sequence listing is submitted electronically via Patent Center as an XML formatted sequence listing with a file named “107131-US-CON-1_Sequence_Listing_ST26”, created on Oct. 4, 2024, and having a size of 1,122 kilobytes and is filed concurrently with the specification. The sequence listing contained in this XML formatted document is part of the specification and is herein incorporated by reference in its entirety.

### BACKGROUND

[0004] Plant breeding programs identify new cultivars by screening numerous plants to identify individuals with desirable characteristics. Large numbers of progeny from crosses are typically grown and evaluated, ideally across multiple years and environments, to select the plants with the most desirable characteristics.

[0005] Typical breeding methods cross two parental plants and the filial 1 hybrid (F₁ hybrid), is the first filial generation. Hybrid vigor in a commercial F₁ hybrid is observed when two parental strains, (typically inbreds), from different heterotic groups are intercrossed. Hybrid vigor, the improved or increased function of any biological quality resulting after combining the genetic contributions of its parents, is important to commercial maize seed production and these commercial hybrid performance improvements require the continued development of new inbred parental lines.

[0006] Maize inbred line development methods use maternal (gynogenic) doubled haploid production, in which maternal haploid embryos are selected following the fertilization of the ear of a plant resultant from a first-generation cross that has been fertilized with pollen from a so-called “haploid inducer” line. Pollination of a female flower with pollen of a haploid inducer strain results in elevated levels of ovules that contain only the haploid maternal genome, as opposed to inheriting a copy of both the maternal and paternal genome, thus, creating maternal haploid embryos. Ovules within the female flower are the products of meiosis and each maternal ovule is a unique meiotically recombined haploid genome, thereby allowing immature maternal haploid embryos to be isolated and treated using in vitro tissue culture methods that include chromosome doubling treatments to rapidly enable generating maternal doubled haploid recombinant populations. Many maize maternal haploid embryos resultant from fertilizing a target plant with pollen from a maize haploid inducer line fail to regenerate into a fertile, doubled haploid plant and few, if any, in vitro tissue culture and plantlet regeneration methods propagate multiple, fertile plants from one haploid embryo. Thus, there is a need for improving methods of producing doubled haploid plants applicable to maternal gamete doubled haploids in maize.

[0007] Most maize inbreds are recalcitrant to microspore isolation, in vitro tissue culture, and plantlet regeneration methods to create paternal (androgenic) gamete doubled haploids. Thus, there is a need for a method of producing doubled haploid plants applicable to paternal gamete doubled haploids in maize.

[0008] Cytoplasmic Male-Sterile (CMS) female lines are produced in the trait introgression process, which requires hand pollination and often results in low seed amounts. This limitation of low seed set is compounded in winter wheat by the requirement for vernalization, limiting the process to one cycle per year. Accelerated propagation would speed up this process, decreasing time to market and cost of goods.

[0009] Plant breeders would thus benefit from methods of developing populations of non-recombinant and recombinant inbred lines that do not require extensive pollination control methods or the prolonged time required for propagating self-fertilized lines into isogenic states.

### SUMMARY

[0010] The present disclosure comprises methods and compositions for In and 2n cells and plants useful in crop breeding programs. In a further aspect, the present disclosure provides a seed from the plant produced by the methods disclosed herein.

[0011] The present disclosure provides a method of producing a clonal plant comprising providing to a first plant cell a morphogenic gene expression cassette; eliciting a growth response in a second plant cell, wherein the second plant cell does not contain the morphogenic gene expression cassette; and regenerating the clonal plant from the second plant cell. In a further aspect, the first plant cell is a cell derived from a In cell. In a further aspect, the In cell is a microspore. In an aspect, the In cell is an embryo. In a further aspect, the first plant cell is a zygotic embryo. In a further aspect, the first plant cell is a 2n embryo. In a further aspect, the providing to the first plant cell comprises particle gun delivery of the morphogenic gene expression cassette. In a further aspect, the providing to the first plant cell comprises bacterial-mediated delivery of the morphogenic gene expression cassette. In a further aspect, the morphogenic gene expression cassette comprises (i) a nucleotide sequence encoding a functional WUS/WOX polypeptide; (ii) a nucleotide sequence encoding a Babyboom (BBM) polypeptide or an Ovule Development Protein 2 (ODP2) polypeptide; (iii) a combination of (i) and (ii). In a further aspect, the nucleotide sequence encoding the functional WUS/WOX polypeptide is selected from the group consisting of WUS1, WUS2, WUS3, WOX2A, WOX4, WOX5, and WOX9. In a further aspect, the nucleotide sequence encodes the Babyboom (BBM) polypeptide or the Ovule Development Protein 2 (ODP2) polypeptide. In a further aspect, the nucleotide sequence encoding the Babyboom (BBM) polypeptide is selected from the group consisting of BBM2, BMN2, and BMN3 or the Ovule Development Protein 2 (ODP2) polypeptide is ODP2. In a further aspect, the nucleotide sequence encodes the functional WUS/WOX polypeptide and the Babyboom (BBM) polypeptide or the Ovule Development Protein 2 (ODP2) polypeptide. In a further aspect, the nucleotide sequence encoding the functional WUS/WOX polypeptide is selected from the group consisting of WUS1, WUS2, WUS3, WOX2A, WOX4, WOX5, and WOX9 and the Babyboom (BBM) polypeptide is selected from the group consisting of BBM2, BMN2, and BMN3 or the Ovule Development Protein 2 (ODP2) polypeptide is ODP2. In a further aspect, the bacterial-mediated delivery is provided by a Rhizobiales bacterial strain. In a further aspect, the Rhizobiales bacterial strain is selected from the group consisting of a disarmed Agrobacterium, an Ochrobactrum bacteria, and a Rhizobiaceae bacteria. In a further aspect, the disarmed Agrobacterium a is selected from the group of AGL-1, EHA105, GV3101, LBA4404, and LBA4404 THY−. In a further aspect, the Ochrobactrum bacteria is selected from Table 2. In a further aspect, the Rhizobiaceae bacteria is selected from Table 3. In a further aspect, the morphogenic gene expression cassette further comprises a promoter selected from Table 4 or Table 5. In a further aspect, the morphogenic gene expression cassette comprises a PLTP promoter operably linked to the nucleotide sequence encoding a functional WUS/WOX polypeptide. In a further aspect, the morphogenic gene expression cassette further comprises an expression modulating element (EME) selected from Table 6. In a further aspect, the morphogenic gene expression cassette further comprises an enhancer selected from Table 7. In a further aspect, the morphogenic gene expression cassette further comprises an expression modulating element (EME) selected from Table 6 and an enhancer selected from Table 7. In a further aspect, the expression modulating element (EME) comprises three copies of an expression modulating element (EME) selected from Table 6. In a further aspect, the enhancer comprises three copies of an enhancer selected from Table 7. In a further aspect, the expression modulating element (EME) comprises three copies of an expression modulating element (EME) selected from Table 6 and the enhancer comprises three copies of an enhancer selected from Table 7. In a further aspect, the three copies of the expression modulating element (EME) are the same expression modulating element (EME) selected from Table 6 or are different expression modulating elements (EMEs) selected from Table. In a further aspect, the three copies of the enhancer are the same enhancer selected from Table 7 or are different enhancers selected from Table 7. In a further aspect, the three copies of the expression modulating element (EME) are the same expression modulating element (EME) selected from Table 6 or are different expression modulating elements (EMEs) selected from Table 6 and the three copies of the enhancer are the same enhancer selected from Table 7 or are different enhancers selected from Table 7. In a further aspect, the morphogenic gene expression cassette further comprises a Ubiquitin promoter operably linked to a LEC1 gene. In a further aspect, the morphogenic gene expression cassette further comprises a PLTP promoter operably linked to a LEC1 gene. In a further aspect, the nucleotide sequence encoding a functional WUS/WOX polypeptide is fused to a T2A viral peptide LEC1 gene fusion. In a further aspect, the morphogenic gene expression cassette further comprises a viral or plant enhancer sequence. In a further aspect, the nucleotide sequence encoding a functional WUS/WOX polypeptide is fused to a T2A viral peptide BBM gene fusion. In a further aspect, the nucleotide sequence encoding a functional WUS/WOX polypeptide is fused to a T2A viral peptide RepA gene fusion. In a further aspect, the morphogenic gene expression cassette further comprises a PLTP promoter operably linked to a PKLamiRNA fusion. In a further aspect, the method further comprising contacting the second plant cell with a chromosome doubling agent and regenerating a doubled haploid plant. In a further aspect, the method further comprises crossing a regenerated clonal plant with a plant comprising a desired genotype/phenotype and growing offspring having the desired genotype/phenotype. In a further aspect, a plant seed and any progeny derived therefrom having the desired genotype/phenotype is provided. In a further aspect, a plant seed and any progeny derived therefrom, and a plant seed and any progeny derived therefrom resulting from a cross of a regenerated clonal plant with a plant comprising a desired genotype/phenotype is provided. In a further aspect, the method further comprises characterizing the second plant cell or a cell derived from the second plant cell; predicting phenotypic performance using a biological model based on genomic data of the characterized second plant cell or the characterized cell derived from the second plant cell; selecting the second plant cell or the cell derived from the second plant cell based on its predicted phenotypic performance; and regenerating a clonal plant derived from the selected second plant cell or the selected cell derived from the second plant cell. In a further aspect, the characterizing is selected from the group consisting of genotyping DNA isolated from the second plant cell or the cell derived from the second plant cell; measuring RNA transcripts isolated from the second plant cell or the cell derived from the second plant cell; measuring nucleosome abundance or densities of chromatin isolated from the second plant cell or the cell derived from the second plant cell; measuring post-translational modifications of histone proteins of chromatin isolated from the second plant cell or the cell derived from the second plant cell; measuring epigenetic modifications of DNA or RNA isolated from the second plant cell or the cell derived from the second plant cell; measuring protein:DNA interactions of chromatin isolated from the second plant cell or the cell derived from the second plant cell; measuring protein:RNA interactions or complexes isolated from the second plant cell or the cell derived from the second plant cell, and a combination of the foregoing. In a further aspect, the predicting phenotypic performance is selected from the group consisting of using genomic data based on genotyping by DNA sequencing of the second plant cell or the cell derived from the second plant cell; using genomic data based on genotyping by assay of the second plant cell or the cell derived from the second plant cell; using genomic data based on a known or predicted expression state of the second plant cell or the cell derived from the second plant cell; using genomic data based on a known or predicted chromatin state of the second plant cell or the cell derived from the second plant cell; using genomic data based on a known or predicted epigenetic regulatory state of the second plant cell or the cell derived from the second plant cell; using genotype imputation of shared haplotype genomic data of the second plant cell or the cell derived from the second plant cell and/or pedigree history data of the second plant cell or the cell derived from the second plant cell; and a combination of the foregoing. In a further aspect, the second plant cell or the cell derived from the second plant cell is selected from the group consisting of callus, undifferentiated callus, immature embryos, mature embryos, immature zygotic embryos, immature cotyledon, embryonic axis, suspension culture cells, protoplasts, leaf, leaf cells, root cells, phloem cells, pollen, seeds, suspension cultures, explants, embryos, zygotic embryos, somatic embryos, embryogenic callus, meristem, somatic meristems, organogenic callus, embryos derived from mature ear-derived seed, leaf bases, leaves from mature plants, leaf tips, immature inflorescences, tassel, immature ear, silks, cotyledons, meristematic regions, cells from leaves, cells from stems, cells from roots, cells from shoots, gametophytes, sporophytes, microspores, multicellular structures (MCS), embryo-like structures; and a combination of the foregoing. In a further aspect, a plant seed of the regenerated clonal plant and a plant seed or any progeny resulting from crossing the regenerated clonal plant with another plant and growing the offspring of the cross with one or more desired traits is provided.

[0012] The present disclosure provides a method of producing a transgenic plant having one copy of a trait gene expression cassette comprising providing to a haploid embryo or an embryo-like structure a trait gene expression cassette and a morphogenic gene expression cassette; selecting a haploid embryo or a haploid embryo-like structure containing the trait gene expression cassette and no morphogenic gene expression cassette; contacting the selected haploid embryo or the selected haploid embryo-like structure with a chromosome doubling agent for a period sufficient to generate a doubled haploid embryo or a doubled haploid embryo-like structure; and regenerating a transgenic plant from the selected doubled haploid embryo or the selected doubled haploid embryo-like structure containing the trait gene expression cassette and no morphogenic gene expression cassette. In a further aspect, the providing to the haploid embryo or the embryo-like structure comprises particle gun delivery of the trait gene expression cassette and the morphogenic gene expression cassette. In a further aspect, the providing to the haploid embryo or the embryo-like structure comprises simultaneously contacting the haploid embryo or the embryo-like structure with the trait gene expression cassette and the morphogenic gene expression cassette. In a further aspect, the providing to the haploid embryo or the embryo-like structure comprises sequentially contacting the haploid embryo or the embryo-like structure with the trait gene expression cassette and the morphogenic gene expression cassette. In a further aspect, the providing to the haploid embryo or the embryo-like structure comprises bacterial-mediated delivery of the trait gene expression cassette and the morphogenic gene expression cassette. In a further aspect, the bacterial-mediated delivery comprises simultaneously contacting the haploid embryo or the embryo-like structure with a T-DNA containing the trait gene expression cassette in a first bacterial strain and a T-DNA containing the morphogenic gene expression cassette in a second bacterial strain. In a further aspect, the bacterial-mediated delivery comprises contacting the haploid embryo or the embryo-like structure with a T-DNA containing the trait gene expression cassette and a T-DNA containing the morphogenic gene expression cassette in one bacterial strain. In a further aspect, the morphogenic gene expression cassette comprises (i) a nucleotide sequence encoding a functional WUS/WOX polypeptide; (ii) a nucleotide sequence encoding a Babyboom (BBM) polypeptide or an Ovule Development Protein 2 (ODP2) polypeptide; (iii) a combination of (i) and (ii). In a further aspect, the nucleotide sequence encoding the functional WUS/WOX polypeptide is selected from the group consisting of WUS1, WUS2, WUS3, WOX2A, WOX4, WOX5, and WOX9. In a further aspect, the nucleotide sequence encodes the Babyboom (BBM) polypeptide or the Ovule Development Protein 2 (ODP2) polypeptide. In a further aspect, the nucleotide sequence encoding the Babyboom (BBM) polypeptide is selected from the group consisting of BBM2, BMN2, and BMN3 or the Ovule Development Protein 2 (ODP2) polypeptide is ODP2. In a further aspect, the nucleotide sequence encodes the functional WUS/WOX polypeptide and the Babyboom (BBM) polypeptide or the Ovule Development Protein 2 (ODP2) polypeptide. In a further aspect, the nucleotide sequence encoding the functional WUS/WOX polypeptide is selected from the group consisting of WUS1, WUS2, WUS3, WOX2A, WOX4, WOX5, and WOX9 and the Babyboom (BBM) polypeptide is selected from the group consisting of BBM2, BMN2, and BMN3 or the Ovule Development Protein 2 (ODP2) polypeptide is ODP2. In a further aspect, the trait gene expression cassette comprises a trait gene selected from the group consisting of a gene conferring pest resistance, a gene conferring herbicide resistance, a gene conferring stress tolerance, a gene conferring drought resistance, a gene conferring nitrogen use efficiency (NUE), a gene conferring disease resistance, and a gene conferring an ability to alter a metabolic pathway. In a further aspect, the trait gene expression cassette further comprises a nucleotide sequence encoding a Babyboom (BBM) polypeptide or an Ovule Development Protein 2 (ODP2) polypeptide. In a further aspect, the nucleotide sequence encoding the Babyboom (BBM) polypeptide is selected from the group consisting of BBM2, BMN2, and BMN3 or the Ovule Development Protein 2 (ODP2) polypeptide is ODP2. In a further aspect, the trait gene expression cassette or the morphogenic gene expression cassette further comprises a polynucleotide encoding a site-specific nuclease. In a further aspect, the site-specific nuclease is selected from the group consisting of a zinc finger nuclease, a meganuclease, TALEN, and a CRISPR-Cas nuclease. In a further aspect, the CRISPR-Cas nuclease is Cas9 or Cpf1 nuclease. In a further aspect, the site-specific nuclease effects an insertion, a deletion, or a substitution mutation. In a further aspect, the method further comprises providing a guide RNA expressed from the trait gene expression cassette or the morphogenic gene expression cassette. In a further aspect, the guide RNA and CRISPR-Cas nuclease is a ribonucleoprotein complex. In a further aspect, the bacterial-mediated delivery is provided by a Rhizobiales bacterial strain. In a further aspect, the Rhizobiales bacterial strain is selected from the group consisting of a disarmed Agrobacterium, an Ochrobactrum bacteria, and a Rhizobiaceae bacteria. In a further aspect, the first bacterial strain and the second bacterial strain are the same bacterial strain. In a further aspect, the same bacterial strain is selected from the group of a disarmed Agrobacterium, an Ochrobactrum bacteria, and a Rhizobiaceae bacteria. In a further aspect, the disarmed Agrobacterium is selected from the group of AGL-1, EHA105, GV3101, LBA4404, and LBA4404 THY−. In a further aspect, the Ochrobactrum bacteria is selected from Table 2 In a further aspect, the Rhizobiaceae bacteria is selected from Table 3. In a further aspect, the first bacterial strain and the second bacterial strain are different bacterial strains. In a further aspect, the different bacterial strains are selected from (i) a disarmed Agrobacterium and an Ochrobactrum bacteria; (ii) a disarmed Agrobacterium and a Rhizobiaceae bacteria; and (iii) a Rhizobiaceae bacteria and an Ochrobactrum bacteria. In a further aspect, the disarmed Agrobacterium is selected from the group of AGL-1, EHA105, GV3101, LBA4404, and LBA4404 THY−. In a further aspect, the Ochrobactrum bacteria is selected from Table 2. In a further aspect, the Rhizobiaceae bacteria is selected from Table 3. In a further aspect, the first bacterial strain and the second bacterial strain are present in a 50:50 ratio. In a further aspect, the first bacterial strain and the second bacterial strain are present in a 75:25 ratio. In a further aspect, the first bacterial strain and the second bacterial strain are present in a 90:10 ratio. In a further aspect, the first bacterial strain and the second bacterial strain are present in a 95:5 ratio. In a further aspect, the first bacterial strain and the second bacterial strain are present in a 99:1 ratio. In a further aspect, the morphogenic gene expression cassette further comprises a promoter selected from Table 4 or Table 5. In a further aspect, the morphogenic gene expression cassette comprises a PLTP promoter operably linked to the nucleotide sequence encoding a functional WUS/WOX polypeptide. In a further aspect, the morphogenic gene expression cassette further comprises an expression modulating element (EME) selected from Table 6 In a further aspect, the morphogenic gene expression cassette further comprises an enhancer selected from Table 7. In a further aspect, the morphogenic gene expression cassette further comprises an expression modulating element (EME) selected from Table 6 and an enhancer selected from Table 7. In a further aspect, the expression modulating element (EME) comprises three copies of an expression modulating element (EME) selected from Table 6. In a further aspect, the enhancer comprises three copies of an enhancer selected from Table 7. In a further aspect, the expression modulating element (EME) comprises three copies of an expression modulating element (EME) selected from Table 6 and the enhancer comprises three copies of an enhancer selected from Table 7. In a further aspect, the expression modulating element (EME) comprises three copies of an expression modulating element (EME) selected from Table 6 and the enhancer comprises three copies of an enhancer selected from Table 7. In a further aspect, the three copies of the expression modulating element (EME) are the same expression modulating element (EME) selected from Table 6 or are different expression modulating elements (EMEs) selected from Table. In a further aspect, the three copies of the enhancer are the same enhancer selected from Table 7 or are different enhancers selected from Table 7. In a further aspect, the three copies of the expression modulating element (EME) are the same expression modulating element (EME) selected from Table 6 or are different expression modulating elements (EMEs) selected from Table 6 and the three copies of the enhancer are the same enhancer selected from Table 7 or are different enhancers selected from Table 7. In a further aspect, the morphogenic gene expression cassette further comprises a Ubiquitin promoter operably linked to a LEC1 gene. In a further aspect, the morphogenic gene expression cassette further comprises a PLTP promoter operably linked to a LEC1 gene. In a further aspect, the nucleotide sequence encoding a functional WUS/WOX polypeptide fused to a T2A viral peptide LEC1 gene fusion. In a further aspect, the morphogenic gene expression cassette further comprises a viral or plant enhancer sequence. In a further aspect, the nucleotide sequence encoding a functional WUS/WOX polypeptide is fused to a T2A viral peptide BBM gene fusion. In a further aspect, the nucleotide sequence encoding a functional WUS/WOX polypeptide is fused to a T2A viral peptide RepA gene fusion. In a further aspect, the morphogenic gene cassette further comprises a PLTP promoter operably linked to a PKLamiRNA fusion. In a further aspect, the method further comprises crossing the regenerated transgenic doubled haploid plant with a plant comprising a desired genotype/phenotype; and growing offspring having the desired genotype/phenotype. In a further aspect, a plant seed and any progeny derived therefrom having the desired genotype/phenotype is provided. In a further aspect, a plant seed and any progeny derived therefrom, and a plant seed and any progeny derived therefrom resulting from a cross of a regenerated transgenic plant with a plant comprising a desired genotype/phenotype is provided.

[0013] The present disclosure provides a method of producing a genetic recombinant plant resulting from the product of meiosis, comprising providing to a 2n embryo resulting from a biparental cross a morphogenic gene expression cassette to induce somatic embryogenesis; exposing the 2n embryo to conditions before, during, or after somatic embryogenesis induction, thereby changing the cell fate of the 2n embryo and allowing entry of the 2n embryo into meiosis thereby producing a 1n embryo; selecting a 1n embryo containing no morphogenic gene expression cassette; contacting the 1n embryo with a chromosome doubling agent for a period sufficient to generate a doubled 1n embryo; and regenerating a genetic recombinant plant from the doubled 1n embryo containing no morphogenic gene expression cassette. In a further aspect, rhe method further comprises obtaining seed or progeny thereof from the genetic recombinant plant containing no morphogenic gene expression cassette. In a further aspect, the providing and/or exposing comprises particle gun delivery. In a further aspect, the particle gun delivery comprises simultaneously contacting the 2n embryo with the morphogenic gene expression cassette and a meiosis induction expression cassette. In a further aspect, the particle gun delivery comprises sequentially contacting the 2n embryo with the morphogenic gene expression cassette and a meiosis induction expression cassette. In a further aspect, the providing and/or exposing comprises bacterial-mediated delivery. In a further aspect, the bacterial-mediated delivery comprises simultaneously contacting the 2n embryo with a T-DNA containing the morphogenic gene expression cassette in a first bacterial strain and a T-DNA containing a meiosis induction expression cassette in a second bacterial strain. In a further aspect, the bacterial-mediated delivery comprises contacting the 2n embryo with a T-DNA containing the morphogenic gene expression cassette and a T-DNA containing a meiosis induction expression cassette in one bacterial strain. In a further aspect, the morphogenic gene expression cassette comprises (i) a nucleotide sequence encoding a functional WUS/WOX polypeptide; (ii) a nucleotide sequence encoding a Babyboom (BBM) polypeptide or an Ovule Development Protein 2 (ODP2) polypeptide; (iii) a combination of (i) and (ii). In a further aspect, the nucleotide sequence encoding functional WUS/WOX polypeptide is selected from WUS1, WUS2, WUS3, WOX2A, WOX4, WOX5, and WOX9. In a further aspect, the nucleotide sequence encodes the Babyboom (BBM) polypeptide or the Ovule Development Protein 2 (ODP2) polypeptide. In a further aspect, the nucleotide sequence encoding the Babyboom (BBM) polypeptide is selected from BBM2, BMN2, and BMN3 or the Ovule Development Protein 2 (ODP2) polypeptide is ODP2. In a further aspect, the nucleotide sequence encodes the functional WUS/WOX polypeptide and the Babyboom (BBM) polypeptide or the Ovule Development Protein 2 (ODP2) polypeptide. In a further aspect, the nucleotide sequence encoding the functional WUS/WOX polypeptide is selected from WUS1, WUS2, WUS3, WOX2A, WOX4, WOX5, and WOX9 and the Babyboom (BBM) polypeptide is selected from BBM2, BMN2, and BMN3 or the Ovule Development Protein 2 (ODP2) polypeptide is ODP2. In a further aspect, the meiosis induction expression cassette comprises a product of a gene or genes produced from a DNA polynucleotide, a product of a gene or genes produced from a RNA polynucleotide, a product of a gene or genes as a protein or part of a protein complex, and a combination of the foregoing. In a further aspect, the gene or genes is selected from any of the sequences listed in Table 19, Table 20, Table 21, and combinations thereof. In a further aspect, the gene or genes selected from Table 19, Table 20, Table 21, and combinations thereof is a cyclin. In a further aspect, the cyclin comprises a cyclin with cyclin-dependent protein serine/threonine kinase regulator activity. In a further aspect, the cyclin regulates synapsis and recombination in prophase I during meiosis progression. In a further aspect, any of the sequences listed in Table 19, Table 20, Table 21, and combinations thereof is mutated to stimulate meiosis. In a further aspect, the bacterial-mediated delivery is provided by a Rhizobiales bacterial strain. In a further aspect, the Rhizobiales bacterial strain is selected from the group consisting of a disarmed Agrobacterium, an Ochrobactrum bacteria, and a Rhizobiaceae bacteria. In a further aspect, the first bacterial strain and the second bacterial strain are the same bacterial strain. In a further aspect, the same bacterial strain is selected from the group of a disarmed Agrobacterium, an Ochrobactrum bacteria, and a Rhizobiaceae bacteria. In a further aspect, the disarmed Agrobacterium is selected from the group of AGL-1, EHA105, GV3101, LBA4404, and LBA4404 THY−. In a further aspect, the Ochrobactrum bacteria is selected from Table 2. In a further aspect, the Rhizobiaceae bacteria is selected from Table 3. In a further aspect, the first bacterial strain and the second bacterial strain are different bacterial strains. In a further aspect, the different bacterial strains are selected from (i) a disarmed Agrobacterium and an Ochrobactrum bacteria; (ii) a disarmed Agrobacterium and a Rhizobiaceae bacteria; and (iii) a Rhizobiaceae bacteria and an Ochrobactrum bacteria. In a further aspect, the disarmed Agrobacterium is selected from the group of AGL-1, EHA105, GV3101, LBA4404, and LBA4404 THY−. In a further aspect, the Ochrobactrum bacteria is selected from Table 2. In a further aspect, the Rhizobiaceae bacteria is selected from Table 3. In a further aspect, the first bacterial strain and the second bacterial strain are present in a 50:50 ratio. In a further aspect, the first bacterial strain and the second bacterial strain are present in a 75:25 ratio. In a further aspect, the first bacterial strain and the second bacterial strain are present in a 90:10 ratio. In a further aspect, the first bacterial strain and the second bacterial strain are present in a 95:5 ratio. In a further aspect, the first bacterial strain and the second bacterial strain are present in a 99:1 ratio. In a further aspect, the exposing further comprises exposing the 2n embryo to a hypoxic environment, exposing the 2n embryo to a reducing agent at concentrations that lower the amount of reactive oxygen species in the 2n embryo, and combinations of the foregoing. In a further aspect, the hypoxic environment comprises an environment that contains less than 10% oxygen. In a further aspect, the hypoxic environment comprises an environment that contains less than 19.5 percent oxygen In a further aspect, the hypoxic environment is created by exposing the 2n embryo to a gas. In a further aspect, the hypoxic environment is created using non-atmospheric percentages of carbon dioxide and nitrogen relative to the percentage of oxygen. In a further aspect, the reducing agent is a liquid comprising a redox-modulatory compound. In a further aspect, the redox-modulatory compound is dissolved in the liquid. In a further aspect, the redox-modulatory compound is in a solid form and is contacted with the 2n embryo. In a further aspect, the redox-modulatory compound comprises a potassium iodide compound. In a further aspect, the redox-modulatory compound comprises a sodium nitroprusside compound.

[0014] The present disclosure provides a method of producing an artificial seed, comprising contacting a 2n embryo resulting from a biparental cross with a T-DNA containing a morphogenic gene expression cassette; collecting a clonal somatic embryo containing no morphogenic gene expression cassette; treating the collected clonal somatic embryo to acquire a mature embryo containing a morphogenic gene expression cassette; and, using the mature embryo to create an artificial seed.

[0015] The present disclosure provides a method for producing an artificial seed, comprising contacting a somatic embryo with a T-DNA containing a morphogenic gene expression cassette; collecting a clonal somatic embryo containing no morphogenic gene expression cassette; treating the clonal somatic embryo to acquire a mature embryo; and, using the mature embryo to create an artificial seed.

[0016] In a further aspect, the 2n embryo or the somatic embryo is an F1 hybrid or a BC1 resulting from a biparental cross. In a further aspect, the artificial seed is used for generating a clonal plant.

### BRIEF DESCRIPTION OF THE FIGURES

[0017] FIG. 1 shows the histogram distribution of regenerated plants per haploid embryo in response to using the RV020636 (SEQ ID NO: 186) plasmid as described in Example 5.

[0018] FIGS. 2A-2D show histogram distributions of genetic estimated breeding values (GEBVs) as described in Example 7. Histogram distribution for the count of DH lines (y axis) in response to estimated breeding values (x axis) show phenotypic predictions for grain moisture (FIG. 2A), grain yield (FIG. 2B), plant height (FIG. 2C) and ear height (FIG. 2D).

[0019] FIG. 3 shows the number of wild-type wheat R0 plants recovered (x axis) per starting embryo (y axis) after Agrobacterium infection with no T-DNA. A total of 26 immature embryos were infected with the Agrobacterium with a cumulative production of 7 shoots resulting in a 27% propagation frequency.

[0020] FIG. 4 shows the number of wild-type wheat R0 plants recovered (x axis) per starting embryo (y axis) after Agrobacterium infection with 3×ENH::PLTP::WUS2. A total of 35 immature embryos were infected with the Agrobacterium with a cumulative production of 182 shoots resulting in a 520% propagation frequency.

[0021] FIG. 5 shows the number of wild-type wheat R0 plants recovered (x axis) per starting embryo (y axis) after Agrobacterium infection with PLTP::ODP2. A total of 38 immature embryos were infected with the Agrobacterium with a cumulative production of 43 shoots resulting in a 113% propagation frequency.

[0022] FIG. 6 shows the number of wild-type wheat R0 plants recovered (x axis) per starting embryo (y axis) after Agrobacterium infection with 3×ENH::PLTP::WUS2+PLTP::ODP2. A total of 38 immature embryos were infected with the Agrobacterium with a cumulative production of 168 shoots resulting in a 442% propagation frequency.

[0023] FIG. 7 shows the number of wild-type sorghum R0 plants recovered (x axis) per starting embryo (y axis) after Agrobacterium infection with no T-DNA. A total of 56 immature embryos were infected with the Agrobacterium with a cumulative production of 102 shoots resulting in a 182% propagation frequency.

[0024] FIG. 8 shows the number of wild-type sorghum R0 plants recovered (x axis) per starting embryo (y axis) after Agrobacterium infection with 3×ENH::PLTP::WUS2. A total of 33 immature embryos were infected with the Agrobacterium with a cumulative production of 103 shoots resulting in a 312% propagation frequency.

[0025] FIG. 9 shows the number of wild-type sorghum R0 plants recovered (x axis) per starting embryo (y axis) after Agrobacterium infection with PLTP::ODP2. A total of 75 immature embryos were infected with the Agrobacterium with a cumulative production of 187 shoots resulting in a 249% propagation frequency.

[0026] FIG. 10 shows the number of wild-type sorghum R0 plants recovered (x axis) per starting embryo (y axis) after Agrobacterium infection with 3×ENH::PLTP::WUS2+PLTP::ODP2 A total of 66 immature embryos were infected with the Agrobacterium with a cumulative production of 217 shoots resulting in a 329% propagation frequency.

[0027] FIG. 11 shows the number of wild-type maize R0 plants recovered (x axis) per starting embryo (y axis) after Agrobacterium infection with no T-DNA. A total of 50 immature embryos were infected with the Agrobacterium with a cumulative production of 13 shoots resulting in a 26% propagation frequency.

[0028] FIG. 12 shows the number of wild-type maize R0 plants recovered (x axis) per starting embryo (y axis) after Agrobacterium infection with 3×ENH::PLTP::WUS2. A total of 50 immature embryos were infected with the Agrobacterium with a cumulative production of 77 shoots resulting in a 154% propagation frequency.

[0029] FIG. 13 shows the number of wild-type maize R0 plants recovered (x axis) per starting embryo (y axis) after Agrobacterium infection with PLTP::ODP2. A total of 50 immature embryos were infected with the Agrobacterium with a cumulative production of 13 shoots resulting in a 26% propagation frequency.

[0030] FIG. 14 shows the number of wild-type maize R0 plants recovered (x axis) per starting embryo (y axis) after Agrobacterium infection with 3×ENH::PLTP::WUS2+PLTP::ODP2. A total of 50 immature embryos were infected with the Agrobacterium with a cumulative production of 109 shoots resulting in a 218% propagation frequency.

### DETAILED DESCRIPTION

[0031] The disclosures herein will be described more fully hereinafter with reference to the accompanying figures, in which some, but not all possible aspects are shown. Indeed, disclosures may be embodied in many different forms and should not be construed as limited to the aspects set forth herein; rather, these aspects are provided so that this disclosure will satisfy applicable legal requirements.

[0032] Many modifications and other aspects disclosed herein will come to mind to one skilled in the art to which the disclosed methods pertain having the benefit of the teachings presented in the following descriptions and the associated figures. Therefore, it is to be understood that the disclosures are not to be limited to the specific aspects disclosed and that modifications and other aspects are intended to be included within the scope of the appended claims. Although specific terms are employed herein, they are used in a generic and descriptive sense only and not for purposes of limitation.

[0033] The terminology used herein is for the purpose of describing particular aspects only and is not intended to be limiting. As used in the specification and in the claims, the term “comprising” can include the aspect of “consisting of” Unless defined otherwise, all technical and scientific terms used herein have the same meaning as commonly understood by one of ordinary skill in the art to which the disclosed methods belong. In this specification and in the claims which follow, reference will be made to a number of terms which shall be defined herein.

[0034] The present disclosure comprises methods for producing non-transgenic and transgenic plants using a morphogenic gene. The present disclosure provides methods of producing non-transgenic plants by rapidly inducing somatic embryogenesis in wild type cells using a morphogenic gene. These methods are useful in plant breeding programs and in particular, in crop plants. For example, in maize the methods of the present disclosure improves the productivity of a maize maternal doubled haploid system, specifically by improving the regeneration of haploid plants per sampled haploid embryo. Due to attrition throughout the production process, haploid induction productivity under field conditions requires an average of fourteen (14) haploid embryos per doubled haploid line produced. The present disclosure provides methods of increasing productivity by producing produce multiple, clonal haploid plants from a haploid embryo.

[0035] The methods of the present disclosure are compatible with early genotyping of haploid plant cells while the cell are being cultured in vitro, thereby allowing the data outputs of these genotyping technologies to be used to predict the phenotypic performance for each plant cell genotype. This predictive selection provides the capability to design doubled haploid (DH) populations comprised of individuals with desirable genetic estimated breeding values in a manner that is expected to accelerate the rate of genetic gain relative to current breeding methods. The current state of the art is limited by the random selection of meiotic recombinants and the probability of recovering a superior outcome that is constrained by a relatively small number of recombinants allocated per DH population. The methods of the present disclosure permit early genotyping allowing the screening of more meiotic recombinants and facilitating the selection of candidates having the desired phenotypic/genotypic characteristics.

[0036] The methods of present disclosure provide a plant cell that is transformed with a morphogenic gene expression cassette expressing a morphogenic gene, thereby allowing the expressed morphogenic gene polypeptide to act upon cells that are not transformed during the transformation process. The methods of the present disclosure provide rapid induction of somatic embryogenesis in wild type cells in response to the activity of a translocated morphogenic gene polypeptide. The activity of a translocated morphogenic gene polypeptide in multiple cells can stimulate the development of multiple somatic embryos. The methods of the present disclosure are useful for generating multiple clonal embryos from a treated explant. When the treated explant is a maternal haploid embryo, the resulting clonal embryos can be contacted with a chromosome doubling agent to create multiple clonal doubled haploid plants per maternal haploid embryo.

[0037] The methods of the present disclosure improve productivity when used in plant breeding efforts by permitting the cross-fertilization of two individual plants derived from a common haploid embryo. This is particularly useful if flower development has shifted in the two respective plants, where one individual may be used as a pollen donor and the second as a pollen receiver, thereby allowing cross-fertilization within clones,

[0038] As used herein, the term “morphogenic gene” means a gene that when ectopically expressed stimulates formation of a somatically-derived structure that can produce a plant. More precisely, ectopic expression of the morphogenic gene stimulates the de novo formation of a somatic embryo or an organogenic structure, such as a shoot meristem, that can produce a plant. This stimulated de novo formation occurs either in the cell in which the morphogenic gene is expressed, or in a neighboring cell. A morphogenic gene can be a transcription factor that regulates expression of other genes, or a gene that influences hormone levels in a plant tissue, both of which can stimulate morphogenic changes. As used herein, the term “morphogenic factor” means a morphogenic gene and/or the protein expressed by a morphogenic gene.

[0039] A morphogenic gene is involved in plant metabolism, organ development, stem cell development, cell growth stimulation, organogenesis, somatic embryogenesis initiation, accelerated somatic embryo maturation, initiation and/or development of the apical meristem, initiation and/or development of shoot meristem, or a combination thereof, such as WUS/WOX genes (WUS1, WUS2, WUS3, WOX2A, WOX4, WOX5, or WOX9) see, U.S. Pat. Nos. 7,348,468 and 7,256,322 and US Patent Application Publication Numbers 2017/0121722 and 2007/0271628, herein incorporated by reference in their entirety; Laux et al. (1996) Development 122:87-96; and Mayer et al. (1998) Cell 95:805-815; van der Graaff et al., 2009, Genome Biology 10:248; Dolzblasz et al., 2016, Mol. Plant 19:1028-39. Modulation of WUS/WOX is expected to modulate plant and/or plant tissue phenotype including plant metabolism, organ development, stem cell development, cell growth stimulation, organogenesis, somatic embryogenesis initiation, accelerated somatic embryo maturation, initiation and/or development of the apical meristem, initiation and/or development of shoot meristem, or a combination thereof. Expression of Arabidopsis WUS can induce stem cells in vegetative tissues, which can differentiate into somatic embryos (Zuo, et al. (2002) Plant J 30:349-359). Also of interest in this regard would be a MYB118 gene (see U.S. Pat. No. 7,148,402), MYB115 gene (see Wang et al. (2008) Cell Research 224-235), a BABYBOOM gene (BBM; see Boutilier et al. (2002) Plant Cell 14:1737-1749), or a CLAVATA gene (see, for example, U.S. Pat. No. 7,179,963).

[0040] Morphogenic polynucleotide sequences and amino acid sequences of WUS/WOX homeobox polypeptides are useful in the disclosed methods. As defined herein, a “functional WUS/WOX nucleotide” is any polynucleotide encoding a protein that contains a homeobox DNA binding domain, a WUS box, and an EAR repressor domain (Ikeda et al., 2009 Plant Cell 21:3493-3505). As demonstrated by Rodriguez et al., 2016 PNAS www.pnas.org/cgi/doi/10.1073/pnas.1607673113 removal of the dimerization sequence which leaves behind the homeobox DNA binding domain, a WUS box, and an EAR repressor domain results in a functional WUS/WOX polypeptide. The Wuschel protein, designated hereafter as WUS, plays a key role in the initiation and maintenance of the apical meristem, which contains a pool of pluripotent stem cells (Endrizzi, et al., (1996) Plant Journal 10:967-979; Laux, et al., (1996) Development 122:87-96; and Mayer, et al., (1998) Cell 95:805-815). Arabidopsis plants mutant for the WUS gene contain stem cells that are misspecified and that appear to undergo differentiation. WUS encodes a novel homeodomain protein which presumably functions as a transcriptional regulator (Mayer, et al., (1998) Cell 95:805-815). The stem cell population of Arabidopsis shoot meristems is believed to be maintained by a regulatory loop between the CLAVATA (CLV) genes which promote organ initiation and the WUS gene which is required for stem cell identity, with the CLV genes repressing WUS at the transcript level, and WUS expression being sufficient to induce meristem cell identity and the expression of the stem cell marker CLV3 (Brand, et al., (2000) Science 289:617-619; Schoof, et al., (2000) Cell 100:635-644). Constitutive expression of WUS in Arabidopsis has been shown to lead to adventitious shoot proliferation from leaves (in planta) (Laux, T., Talk Presented at the XVI International Botanical Congress Meeting, Aug. 1-7, 1999, St. Louis, Mo.).

[0041] In an aspect, the WUS/WOX homeobox polypeptide useful in the methods of the present disclosure is a WUS1, WUS2, WUS3, WOX2A, WOX4, WOX5, WOX5A, or WOX9 polypeptide (see, U.S. Pat. Nos. 7,348,468 and 7,256,322 and US Patent Application Publication Numbers 2017/0121722 and 2007/0271628, herein incorporated by reference in their entirety and van der Graaff et al., 2009, Genome Biology 10:248). The WUS/WOX homeobox polypeptide useful in the methods of the present disclosure can be obtained from or derived from any of the plants described herein. Additional WUS/WOX genes useful in the methods of the present disclosure are listed in Table 1 below.

TABLE 1

| | Polynucleotide | | |
|---|---|---|---|
| SEQ | (DNA) or | | |
| ID | Polypeptide | | |
| NO: | (PRT) | Name | Description |
| 1 | DNA | AT-WUS | Arabidopsis thaliana WUS coding |
| | | | sequence |
| 2 | PRT | AT-WUS | Arabidopsis thaliana WUS protein |
| | | | sequence |
| 3 | DNA | LJ-WUS | Lotus japonicus WUS coding sequence |
| 4 | PRT | LJ-WUS | Lotus japonicus WUS protein sequence |
| 5 | DNA | GM-WUS | Glycine max WUS coding sequence |
| 6 | PRT | GM-WUS | Glycine max WUS protein sequence |
| 7 | DNA | CS-WUS | Camelina sativa WUS coding sequence |
| 8 | PRT | CS-WUS | Camelina sativa WUS protein sequence |
| 9 | DNA | CR-WUS | Capsella rubella WUS coding sequence |
| 10 | PRT | CR-WUS | Capsella rubella WUS protein sequence |
| 11 | DNA | AA-WUS | Arabis alpina WUS coding sequence |
| 12 | PRT | AA-WUS | Arabis alpina WUS protein sequence |
| 13 | DNA | RS-WUS | Raphanus sativus WUS coding sequence |
| 14 | PRT | RS-WUS | Raphanus sativus WUS protein sequence |
| 15 | DNA | BN-WUS | Brassica napus WUS coding sequence |
| 16 | PRT | BN-WUS | Brassica napus WUS protein sequence |
| 17 | DNA | BO-WUS | Brassica oleracea var. oleracea WUS |
| | | | coding sequence |
| 18 | PRT | BO-WUS | Brassica oleracea var. oleracea WUS |
| | | | protein sequence |
| 19 | DNA | HA-WUS | Helianthus annuus WUS coding |
| | | | sequence |
| 20 | PRT | HA-WUS | Helianthus annuus WUS protein |
| | | | sequence |
| 21 | DNA | PT-WUS | Populus trichocarpa WUS coding |
| | | | sequence |
| 22 | PRT | PT-WUS | Populus trichocarpa WUS protein |
| | | | sequence |
| 23 | DNA | VV-WUS | Vitus vinifera WUS coding sequence |
| 24 | PRT | VV-WUS | Vitus vinifera WUS protein sequence |
| 25 | DNA | AT-WUS | Arabidopsis thaliana WUS coding |
| | | | sequence (soy optimized) |
| 26 | PRT | AT-WUS | Arabidopsis thaliana WUS protein |
| | | | sequence |
| 27 | DNA | LJ-WUS | Lotus japonicus WUS coding sequence |
| | | | (soy optimized) |
| 28 | PRT | LJ-WUS | Lotus japonicus WUS protein sequence |
| 29 | DNA | MT-WUS | Medicago truncatula WUS coding |
| | | | sequence (soy optimized) |
| 30 | PRT | MT-WUS | Medicago truncatula WUS protein |
| | | | sequence |
| 31 | DNA | PY-WUS | Petunia hybrida WUS coding sequence |
| | | | (soy optimized) |
| 32 | PRT | PY-WUS | Petunia hybrida WUS protein sequence |
| 33 | DNA | PV-WUS | Phaseolus vulgaris WUS coding |
| | | | sequence (soy optimized) |
| 34 | PRT | PV-WUS | Phaseolus vulgaris WUS protein |
| | | | sequence |

[0042] Other morphogenic genes useful in the present disclosure include, but are not limited to, LEC1 (U.S. Pat. No. 6,825,397 incorporated herein by reference in its entirety, Lotan et al., 1998, Cell 93:1195-1205), LEC2 (Stone et al., 2008, PNAS 105:3151-3156; Belide et al., 2013, Plant Cell Tiss. Organ Cult 113:543-553), KN1/STM (Sinha et al., 1993. Genes Dev 7:787-795), the IPT gene from Agrobacterium (Ebinuma and Komamine, 2001, In vitro Cell. Dev Biol—Plant 37:103-113), MONOPTEROS-DELTA (Ckurshumova et al., 2014, New Phytol. 204:556-566), the Agrobacterium AV-6b gene (Wabiko and Minemura 1996, Plant Physiol. 112:939-951), the combination of the Agrobacterium IAA-h and IAA-m genes (Endo et al., 2002, Plant Cell Rep., 20:923-928), the Arabidopsis SERK gene (Hecht et al., 2001, Plant Physiol. 127:803-816), the Arabidopsis AGL15 gene (Harding et al., 2003, Plant Physiol. 133:653-663), the FUSCA gene (Castle and Meinke, Plant Cell 6:25-41), and the PICKLE gene (Ogas et al., 1999, PNAS 96:13839-13844).

[0043] As used herein, the term “expression cassette” means a distinct component of vector DNA consisting of coding and non-coding sequences including 5′ and 3′ regulatory sequences that control expression in a transformed/transfected cell.

[0044] As used herein, the term “coding sequence” means the portion of DNA sequence bounded by a start and a stop codon that encodes the amino acids of a protein.

[0045] As used herein, the term “non-coding sequence” means the portions of a DNA sequence that are transcribed to produce a messenger RNA, but that do not encode the amino acids of a protein, such as 5′ untranslated regions, introns and 3′ untranslated regions. Non-coding sequence can also refer to RNA molecules such as micro-RNAs, interfering RNA or RNA hairpins, that when expressed can down-regulate expression of an endogenous gene or another transgene.

[0046] As used herein, the term “regulatory sequence” means a segment of a nucleic acid molecule which is capable of increasing or decreasing the expression of a gene. Regulatory sequences include promoters, terminators, enhancer elements, silencing elements, 5′ UTR and 3′ UTR (untranslated region).

[0047] As used herein, the term “transfer cassette” means a T-DNA comprising an expression cassette or expression cassettes flanked by the right border and the left border.

[0048] As used herein, the term “T-DNA” means a portion of a Ti plasmid that is inserted into the genome of a host plant cell.

[0049] As used herein, the term “embryo” means embryos and progeny of the same, immature and mature embryos, immature zygotic embryo, zygotic embryos, somatic embryos, embryogenic callus, and embryos derived from mature ear-derived seed. An embryo is a structure that is capable of germinating to form a plant.

[0050] As used herein, the term “In cell” means a cell containing a single set of chromosomes, typically the product of meiosis. Examples of a In cell include gametes such as sperm cells, egg cells, or tissues derived from a gamete through mitotic divisions, such as a 1n embryo or a In plant. In corn where the plant is normally diploid, and the gametes are haploid, such gamete-derived embryos or plants are referred to as haploid embryos and haploid plants.

[0051] As used herein, the term “2n cell” means a cell containing two sets of chromosomes. Examples of 2n cells include a zygote, an embryo resulting from mitotic divisions of a zygote, or a plant produced by germination of a 2n embryo.

[0052] As used herein, the term “haploid plant” or “haploid” means a plant having a single set (genome) of chromosomes and the reduced number of chromosomes (n) in the haploid plant is equal to that in the gamete.

[0053] As used herein, the term “diploid plant” means a plant having two sets (genomes) of chromosomes and the chromosome number (2n) is equal to that in the zygote.

[0054] As used herein, the term “doubled haploid” or “doubled haploid plant” or “doubled haploid cell” means one that is developed by the doubling of a haploid set of chromosomes. A plant or seed that is obtained from a doubled haploid plant that is selfed any number of generations is still identified as a doubled haploid plant. A doubled haploid plant is considered a homozygous plant. A plant is considered a doubled haploid if it is fertile, even if the entire vegetative part of the plant does not consist of the cells with the doubled set of chromosomes. For example, a plant will be considered a doubled haploid plant if it contains viable gametes, even if the plant is chimeric.

[0055] As used herein, the term “doubled haploid embryo” means an embryo that has one or more cells containing two (2) sets of homozygous chromosomes that can then be grown into a doubled haploid plant.

[0056] As used herein, the term “clonal” means multiple propagated plant cells or plants that are genetically, epigenetically and morphologically identical.

[0057] As used herein, the term “gamete” means a In reproductive cell such as a sperm cell, an egg cell or an ovule cell resulting from meiosis.

[0058] As used herein, the term “haploid embryo” means a gamete-derived somatic structure.

[0059] As used herein, the term “somatic structure” means a tissue, organ or organism.

[0060] As used herein, the term “somatic cell” is a cell that is not a gamete. Somatic cells, tissues or plants can be haploid, diploid, triploid, tetraploid, hexaploid, etc. A complete set of chromosomes is referred to as being In (haploid), with the number of chromosomes found in a single set of chromosomes being referred to as the monoploid number (x). For example, in the diploid plant Zea mays, 2n=2x=20 total chromosomes, while in diploid rice Oryza sativa, 2n=2x=24 total chromosomes. In a triploid plant, such as banana, 2n=3x=33 total chromosomes. In hexaploid wheat Triticum aestivum, 2n=6x=42. Ploidy levels can also vary between cultivars within the same species, such as in sugarcane, Saccharum officinarum, where 2n=0x=80 chromosomes, but commercial sugarcane varieties range from 100 to 130 chromosomes.

[0061] As used herein, the term “anther” means a part of the stamen containing the microsporangia that is attached to the filament

[0062] As used herein, the term “locule” means a compartment within anthers containing the male gametes during microgametogenesis.

[0063] As used herein, the term “microgametogenesis” means the process in plant reproduction where a microgametophyte, herein called “microspores”, develops in a pollen grain to the three-celled stage of its development.

[0064] As used herein, the term “microsporangium (plural microsporangia)” means a sporangium that produces spores that give rise to male gametophytes. In nearly all land plants, sporangia are the site of meiosis and produce genetically distinct haploid spores.

[0065] As used herein, the term “microspore embryogenesis” means the activation of androgenic embryogenesis using microspores.

[0066] As used herein, the term “microspore-derived embryo” or “embryoid” or “embryo-like structure” means a cell or cells derived from a microspore with a cell fate and development characteristic of cells undergoing embryogenesis.

[0067] As used herein, the term “androgenic” means induction of androgenesis, for example, parthenogenesis in which the embryo contains only paternal chromosomes for haploid or diploid cells.

[0068] As used herein, the term “contacting”, “comes in contact with” or “in contact with” mean “direct contact” or “indirect contact”. For example, the medium comprising a doubling agent may have “direct contact” with a haploid cell or the medium comprising a doubling agent may be separated from a haploid cell by filter paper, plant tissues, or other cells, thus the doubling agent has “indirect contact” with the haploid cell and is transferred through the filter paper, plant tissues or other cells to the haploid cell.

[0069] As used herein, the term “biparental cross” is the cross-fertilization of two genetically different plants to obtain the first filial generation of offspring and/or any successive filial generation thereafter. As used herein a biparental cross includes the offspring that are the progeny of any filial generation of offspring, including cross-fertilizing an offspring to one of its parental lines or an individual genetically like its parent to obtain progeny with a genetic identity closer to that of the parent referred to as a “backcross” and/or any successive backcross generation thereafter.

[0070] As used herein, the term “medium” includes compounds in liquid, gas, or solid states.

[0071] As used herein, the term “selectable marker” means a transgene that when expressed in a transformed/transfected cell confers resistance to selective agents such as antibiotics, herbicides and other compounds toxic to an untransformed/untransfected cell.

[0072] As used herein, the term “EAR” means an “Ethylene-responsive element binding factor-associated Amphiphilic Repression motif” with a general consensus sequence of LLxLxL, DNLxxP, LxLxPP, R/KLFGV, or TLLLFR that act as transcriptional repression signals within transcription factors. Addition of an EAR-type repressor element to a DNA-binding protein such as a transcription factor, dCAS9, or LEXA (as examples) confers transcriptional repression function to the fusion protein (Kagale, S., and Rozwadowski, K. 2010. Plant Signaling and Behavior 5:691-694).

[0073] As used herein, the term “transcription factor” means a protein that controls the rate of transcription of specific genes by binding to the DNA sequence of the promoter and either up-regulating or down-regulating expression. Examples of transcription factors, which are also morphogenic genes, include members of the AP2/EREBP family (including the BBM (ODP2), plethora and aintegumenta sub-families, CAAT-box binding proteins such as LEC1 and HAP3, and members of the MYB, bHLH, NAC, MADS, bZIP and WRKY families.

[0074] Morphogenic polynucleotide sequences and amino acid sequences of Ovule Development Protein 2 (ODP2) polypeptides, and related polypeptides, e.g., Babyboom (BBM) protein family proteins are useful in the methods of the present disclosure. In an aspect, a polypeptide comprising two AP2-DNA binding domains is an ODP2, BBM2, BMN2, or BMN3 polypeptide see, US Patent Application Publication Number 2017/0121722, herein incorporated by reference in its entirety. ODP2 polypeptides useful in the methods of the present disclosure contain two predicted APETALA2 (AP2) domains and are members of the AP2 protein family (PFAM Accession PF00847). The AP2 family of putative transcription factors has been shown to regulate a wide range of developmental processes, and the family members are characterized by the presence of an AP2 DNA binding domain. This conserved core is predicted to form an amphipathic alpha helix that binds DNA. The AP2 domain was first identified in APETALA2, an Arabidopsis protein that regulates meristem identity, floral organ specification, seed coat development, and floral homeotic gene expression. The AP2 domain has now been found in a variety of proteins.

[0075] ODP2 polypeptides useful in the methods of the present disclosure share homology with several polypeptides within the AP2 family, e.g., see FIG. 1 of U.S. Pat. No. 8,420,893, which is incorporated herein by reference in its entirety, provides an alignment of the maize and rice ODP2 polypeptides with eight other proteins having two AP2 domains. A consensus sequence of all proteins appearing in the alignment of U.S. Pat. No. 8,420,893 is also provided in FIG. 1 therein. The polypeptide comprising the two AP2-DNA binding domains useful in the methods of the present disclosure can be obtained from or derived from any of the plants described herein. In an aspect, the polypeptide comprising the two AP2-DNA binding domains useful in the methods of the present disclosure is an ODP2 polypeptide. In an aspect, the polypeptide comprising the two AP2-DNA binding domains useful in the methods of the present disclosure is a BBM2 polypeptide. The ODP2 polypeptide and the BBM2 polypeptide useful in the methods of the present disclosure can be obtained from or derived from any of the plants described herein.

[0076] A morphogenic gene may be stably incorporated into the genome of a plant or it may be transiently expressed. In an aspect, expression of the morphogenic gene is controlled. The controlled expression may be a pulsed expression of the morphogenic gene for a particular period of time. Alternatively, the morphogenic gene may be expressed in only some transformed cells and not expressed in others. The control of expression of the morphogenic gene can be achieved by a variety of methods as disclosed herein below. The morphogenic genes useful in the methods of the present disclosure may be obtained from or derived from any plant species described herein.

[0077] The term “plant” refers to whole plants, plant organs (e.g., leaves, stems, roots, etc.), plant tissues, plant cells, plant parts, seeds, propagules, embryos and progeny of the same. Plant cells can be differentiated or undifferentiated (e.g. callus, undifferentiated callus, immature and mature embryos, immature zygotic embryo, immature cotyledon, embryonic axis, suspension culture cells, protoplasts, leaf, leaf cells, root cells, phloem cells and pollen). Plant cells include, without limitation, cells from seeds, suspension cultures, explants, immature embryos, embryos, zygotic embryos, somatic embryos, embryogenic callus, meristem, somatic meristems, organogenic callus, protoplasts, embryos derived from mature ear-derived seed, leaf bases, leaves from mature plants, leaf tips, immature inflorescences, tassel, immature ear, silks, cotyledons, immature cotyledons, meristematic regions, callus tissue, cells from leaves, cells from stems, cells from roots, cells from shoots, gametophytes, sporophytes, pollen, microspores, multicellular structures (MCS), and embryo-like structures. Plant parts include differentiated and undifferentiated tissues including, but not limited to, roots, stems, shoots, leaves, pollen, seeds, tumor tissue and various forms of cells in culture (e. g., single cells, protoplasts, embryos, and callus tissue). The plant tissue may be in a plant or in a plant organ, tissue, or cell culture. Grain is intended to mean the mature seed produced by commercial growers for purposes other than growing or reproducing the species. Progeny, variants and mutants of the regenerated plants are also included within the scope of the present disclosure, provided these progeny, variants and mutants comprise the introduced polynucleotides.

[0078] The present disclosure may be used for transformation of any plant species, including, but not limited to, monocots and dicots. Monocots include, but are not limited to, barley, maize (corn), millet (e.g., pearl millet (Pennisetum glaucum), proso millet (Panicum miliaceum), foxtail millet (Setaria italica), finger millet (Eleusine coracana), teff (Eragrostis tef), oats, rice, rye, Setaria sp., sorghum, triticale, or wheat, or leaf and stem crops, including, but not limited to, bamboo, marram grass, meadow-grass, reeds, ryegrass, sugarcane; lawn grasses, ornamental grasses, and other grasses such as switchgrass and turf grass. Alternatively, dicot plants used in the present disclosure, include, but are not limited to, kale, cauliflower, broccoli, mustard plant, cabbage, pea, clover, alfalfa, broad bean, tomato, peanut, cassava, soybean, canola, alfalfa, sunflower, safflower, tobacco, Arabidopsis, or cotton.

[0079] Examples of plant species of interest include, but are not limited to, corn (Zea mays), Brassica sp. (e.g., B. napus, B. rapa, B. juncea), particularly those Brassica species useful as sources of seed oil, alfalfa (Medicago sativa), rice (Oryza sativa), rye (Secale cereale), sorghum (Sorghum bicolor, Sorghum vulgare), millet (e.g., pearl millet (Pennisetum glaucum), proso millet (Panicum miliaceum), foxtail millet (Setaria italica), finger millet (Eleusine coracana)), sunflower (Helianthus annuus), safflower (Carthamus tinctorius), wheat (Triticum aestivum), soybean (Glycine max), tobacco (Nicotiana tabacum), potato (Solanum tuberosum), peanuts (Arachis hypogaea), cotton (Gossypium barbadense, Gossypium hirsutum), sweet potato (Ipomoea batatus), cassava (Manihot esculenta), coffee (Coffea spp.), coconut (Cocos nucifera), pineapple (Ananas comosus), citrus trees (Citrus spp.), cocoa (Theobroma cacao), tea (Camellia sinensis), banana (Musa spp.), avocado (Persea americana), fig (Ficus casica), guava (Psidium guajava), mango (Mangifera indica), olive (Olea europaea), papaya (Carica papaya), cashew (Anacardium occidentale), macadamia (Macadamia integrifolia), almond (Prunus amygdalus), sugar beets (Beta vulgaris), sugarcane (Saccharum spp.), oats, barley, vegetables, ornamentals, and conifers.

[0080] In specific aspects, plants transformed by the methods of the present disclosure are crop plants (for example, corn, alfalfa, sunflower, Brassica, soybean, cotton, safflower, peanut, rice. sorghum, wheat, millet, tobacco, etc.). Plants of particular interest include grain plants that provide seeds of interest, oil-seed plants, and leguminous plants. Seeds of interest include grain seeds, such as corn, wheat, barley, rice, sorghum, rye, etc. Oil-seed plants include cotton, soybean, safflower, sunflower, Brassica, maize, alfalfa, palm, coconut, etc. Leguminous plants include, but are not limited to, beans and peas. Beans include, but are not limited to, guar, locust bean, fenugreek, soybean, garden beans, cowpea, mungbean, lima bean, fava bean, lentils, and chickpea.

[0081] The present disclosure also includes plants obtained by any of the disclosed methods herein. The present disclosure also includes seeds from a plant obtained by any of the disclosed methods herein. A transgenic plant is defined as a mature, fertile plant that contains a transgene.

[0082] In the disclosed methods, various plant-derived explants can be used, including immature embryos, 1-5 mm zygotic embryos, 3-5 mm embryos, and embryos derived from mature ear-derived seed, leaf bases, leaves from mature plants, leaf tips, immature inflorescences, tassel, immature ear, and silks. In an aspect, the explants used in the disclosed methods can be derived from mature ear-derived seed, leaf bases, leaves from mature plants, leaf tips, immature inflorescences, tassel, immature ear, and silks. The explant used in the disclosed methods can be derived from any of the plants described herein.

[0083] The present disclosure encompasses isolated or substantially purified nucleic acid compositions. An “isolated” or “purified” nucleic acid molecule or protein or a biologically active portion thereof is substantially free of other cellular material or components that normally accompany or interact with the nucleic acid molecule or protein as found in its naturally occurring environment or is substantially free of culture medium when produced by recombinant techniques or substantially free of chemical precursors or other chemicals when chemically synthesized. An “isolated” nucleic acid is substantially free of sequences (including protein encoding sequences) that naturally flank the nucleic acid (i.e., sequences located at the 5′ and 3′ ends of the nucleic acid) in the genomic DNA of the organism from which the nucleic acid is derived. For example, in various aspects, an isolated nucleic acid molecule can contain less than about 5 kb, 4 kb, 3 kb, 2 kb, 1 kb, 0.5 kb or 0.1 kb of nucleotide sequences that naturally flank the nucleic acid molecule in genomic DNA of the cell from which the nucleic acid is derived. A protein that is substantially free of cellular material includes preparations of protein having less than about 30%, 20%, 10%, 5%, or 1% (by dry weight) of contaminating protein. When a protein useful in the methods of the present disclosure or biologically active portion thereof is recombinantly produced, optimally culture medium represents less than about 30%, 20%, 10%, 5%, or 1% (by dry weight) of chemical precursors or non-protein-of-interest chemicals. Sequences useful in the methods of the present disclosure may be isolated from the 5′ untranslated region flanking their respective transcription initiation sites. The present disclosure encompasses isolated or substantially purified nucleic acid or protein compositions useful in the methods of the present disclosure.

[0084] As used herein, the term “fragment” refers to a portion of the nucleic acid sequence. Fragments of sequences useful in the methods of the present disclosure retain the biological activity of the nucleic acid sequence. Alternatively, fragments of a nucleotide sequence that are useful as hybridization probes may not necessarily retain biological activity. Fragments of a nucleotide sequence disclosed herein may range from at least about 20, 25, 50, 75, 100, 125, 150, 175, 200, 225, 250, 275, 300, 325, 350, 375, 400, 425, 450, 475, 500, 525, 550, 575, 600, 625, 650, 675, 700, 725, 750, 775, 800, 825, 850, 875, 900, 925, 950, 975, 1000, 1025, 1050, 1075, 1100, 1125, 1150, 1175, 1200, 1225, 1250, 1275, 1300, 1325, 1350, 1375, 1400, 1425, 1450, 1475, 1500, 1525, 1550, 1575, 1600, 1625, 1650, 1675, 1700, 1725, 1750, 1775, 1800, 1825, 1850, 1875, or 1900 nucleotides, and up to the full length of the subject sequence. A biologically active portion of a nucleotide sequence can be prepared by isolating a portion of the sequence and assessing the activity of the portion.

[0085] Fragments and variants of nucleotide sequences and the proteins encoded thereby useful in the methods of the present disclosure are also encompassed. As used herein, the term “fragment” refers to a portion of a nucleotide sequence and hence the protein encoded thereby or a portion of an amino acid sequence. Fragments of a nucleotide sequence may encode protein fragments that retain the biological activity of the native protein. Alternatively, fragments of a nucleotide sequence useful as hybridization probes generally do not encode fragment proteins retaining biological activity. Thus, fragments of a nucleotide sequence may range from at least about 20 nucleotides, about 50 nucleotides, about 100 nucleotides, and up to the full-length nucleotide sequence encoding the proteins useful in the methods of the present disclosure.

[0086] As used herein, the term “variants” is means sequences having substantial similarity with a sequence disclosed herein. A variant comprises a deletion and/or addition of one or more nucleotides or peptides at one or more internal sites within the native polynucleotide or polypeptide and/or a substitution of one or more nucleotides or peptides at one or more sites in the native polynucleotide or polypeptide. For polynucleotides, conservative variants include those sequences that, because of the degeneracy of the genetic code, encode the amino acid sequence of one of the morphogenic genes and/or genes/polynucleotides of interest disclosed herein. Variant polynucleotides also include synthetically derived polynucleotides, such as those generated, for example, by using site-directed mutagenesis but which still encode a protein of a morphogenic gene and/or gene/polynucleotide of interest disclosed herein. Generally, variants of a particular morphogenic gene and/or gene/polynucleotide of interest disclosed herein will have at least about 40%, 45%, 50%, 55%, 60%, 65%, 70%, 75%, 80%, 85%, 90%, 91%, 92%, 93%, 94%, 95%, 96%, 97%, 98%, 99% or more sequence identity to that particular morphogenic gene and/or gene/polynucleotide of interest as determined by sequence alignment programs and parameters described elsewhere herein.

[0087] As used herein, a “native” nucleotide or peptide sequence comprises a naturally occurring nucleotide or peptide sequence, respectively. For nucleotide sequences, naturally occurring variants can be identified with the use of well-known molecular biology techniques, such as, for example, with polymerase chain reaction (PCR) and hybridization techniques as outlined herein. A biologically active variant of a protein useful in the methods of the present disclosure may differ from that native protein by as few as 1-15 amino acid residues, as few as 1-10, such as 6-10, as few as 5, as few as 4, 3, 2, or even 1 amino acid residue.

[0088] Variant nucleotide sequences also include synthetically derived nucleotide sequences, such as those generated, for example, by using site-directed mutagenesis. Generally, variants of a nucleotide sequence disclosed herein will have at least 40%, 50%, 60%, 65%, 70%, 75%, 80%, 85%, 90%, 91%, 92%, 93%, 94%, to 95%, 96%, 97%, 98%, 99% or more sequence identity to that nucleotide sequence as determined by sequence alignment programs described elsewhere herein using default parameters. Biologically active variants of a nucleotide sequence disclosed herein are also encompassed. Biological activity may be measured by using techniques such as Northern blot analysis, reporter activity measurements taken from transcriptional fusions, and the like. See, for example, Sambrook, et al., (1989) Molecular Cloning: A Laboratory Manual (2d ed., Cold Spring Harbor Laboratory Press, Cold Spring Harbor, N.Y.), hereinafter “Sambrook,” herein incorporated by reference in its entirety. Alternatively, levels of a reporter gene such as green fluorescent protein (GFP) or yellow fluorescent protein (YFP) or the like produced under the control of a promoter operably linked to a nucleotide fragment or variant can be measured. See, for example, Matz et al. (1999) Nature Biotechnology 17:969-973; U.S. Pat. No. 6,072,050, herein incorporated by reference in its entirety; Nagai, et al., (2002) Nature Biotechnology 20(1):87-90. Variant nucleotide sequences also encompass sequences derived from a mutagenic and recombinogenic procedure such as DNA shuffling. With such a procedure, one or more different nucleotide sequences can be manipulated to create a new nucleotide sequence. In this manner, libraries of recombinant polynucleotides are generated from a population of related sequence polynucleotides comprising sequence regions that have substantial sequence identity and can be homologously recombined in vitro or in vivo. Strategies for such DNA shuffling are known in the art. See, for example, Stemmer, (1994) Proc. Natl. Acad. Sci. USA 91:10747-10751; Stemmer, (1994) Nature 370:389 391; Crameri, et al., (1997) Nature Biotech. 15:436-438; Moore, et al., (1997) J. Mol. Biol. 272:336-347; Zhang, et al., (1997) Proc. Natl. Acad. Sci. USA 94:4504-4509; Crameri, et al., (1998) Nature 391:288-291 and U.S. Pat. Nos. 5,605,793 and 5,837,458, herein incorporated by reference in their entirety.

[0089] Methods for mutagenesis and nucleotide sequence alterations are well known in the art. See, for example, Kunkel, (1985) Proc. Natl. Acad. Sci. USA 82:488-492; Kunkel, et al., (1987) Methods in Enzymol. 154:367-382; U.S. Pat. No. 4,873,192; Walker and Gaastra, eds. (1983) Techniques in Molecular Biology (MacMillan Publishing Company, New York) and the references cited therein, herein incorporated by reference in their entirety. Guidance as to appropriate amino acid substitutions that do not affect biological activity of the protein of interest may be found in the model of Dayhoff et al. (1978) Atlas of Protein Sequence and Structure (Natl. Biomed. Res. Found., Washington, D.C.), herein incorporated by reference. Conservative substitutions, such as exchanging one amino acid with another having similar properties, may be optimal.

[0090] The nucleotide sequences of the present disclosure can be used to isolate corresponding sequences from other organisms, particularly other plants, more particularly other monocots or dicots. In this manner, methods such as PCR, hybridization and the like can be used to identify such sequences based on their sequence homology to the sequences set forth herein. Sequences isolated based on their sequence identity to the entire sequences set forth herein or to fragments thereof are encompassed by the present disclosure.

[0091] In a PCR approach, oligonucleotide primers can be designed for use in PCR reactions to amplify corresponding DNA sequences from cDNA or genomic DNA extracted from any plant of interest. Methods for designing PCR primers and PCR cloning are generally known in the art and are disclosed in, Sambrook, supra. See also, Innis, et al., eds. (1990) PCR Protocols: A Guide to Methods and Applications (Academic Press, New York); Innis and Gelfand, eds. (1995) PCR Strategies (Academic Press, New York); and Innis and Gelfand, eds. (1999) PCR Methods Manual (Academic Press, New York), herein incorporated by reference in their entirety. Known methods of PCR include, but are not limited to, methods using paired primers, nested primers, single specific primers, degenerate primers, gene-specific primers, vector-specific primers, partially-mismatched primers and the like.

[0092] In hybridization techniques, all or part of a known nucleotide sequence is used as a probe that selectively hybridizes to other corresponding nucleotide sequences present in a population of cloned genomic DNA fragments or cDNA fragments (i.e., genomic or cDNA libraries) from a chosen organism. The hybridization probes may be genomic DNA fragments, cDNA fragments, RNA fragments, or other oligonucleotides and may be labeled with a detectable group such as 32P or any other detectable marker. Thus, for example, probes for hybridization can be made by labeling synthetic oligonucleotides based on the sequences of the present disclosure. Methods for preparation of probes for hybridization and for construction of genomic libraries are generally known in the art and are disclosed in Sambrook, supra.

[0093] In general, sequences that have activity and hybridize to the sequences disclosed herein will be at least 40% to 50% homologous, about 60%, 70%, 80%, 85%, 90%, 95% to 98% homologous or more with the disclosed sequences. That is, the sequence similarity of sequences may range, sharing at least about 40% to 50%, about 60% to 70%, and about 80%, 85%, 90%, 95% to 98% sequence similarity.

[0094] Methods of alignment of sequences for comparison are well known in the art. Thus, the determination of percent sequence identity between any two sequences can be accomplished using a mathematical algorithm. Non-limiting examples of such mathematical algorithms are the algorithm of Myers and Miller, (1988) CABIOS 4:11-17; the algorithm of Smith, et al., (1981) Adv. Appl. Math. 2:482; the algorithm of Needleman and Wunsch, (1970) J. Mol. Biol. 48:443-453; the algorithm of Pearson and Lipman, (1988) Proc. Natl. Acad. Sci. 85:2444-2448; the algorithm of Karlin and Altschul, (1990) Proc. Natl. Acad. Sci. USA 872:264, modified as in Karlin and Altschul, (1993) Proc. Natl. Acad. Sci. USA 90:5873-5877, herein incorporated by reference in their entirety. Computer implementations of these mathematical algorithms are well known in the art and can be utilized for comparison of sequences to determine sequence identity.

[0095] As used herein, “sequence identity” or “identity” in the context of two nucleic acid or polypeptide sequences refers to the residues in the two sequences that are the same when aligned for maximum correspondence over a specified comparison window. When percentage of sequence identity is used in reference to proteins it is recognized that residue positions which are not identical often differ by conservative amino acid substitutions, where amino acid residues are substituted for other amino acid residues with similar chemical properties (e.g., charge or hydrophobicity) and therefore do not change the functional properties of the molecule. When sequences differ in conservative substitutions, the percent sequence identity may be adjusted upwards to correct for the conservative nature of the substitution. Sequences that differ by such conservative substitutions are said to have “sequence similarity” or “similarity”. Means for making this adjustment are well known to those of skill in the art. Typically, this involves scoring a conservative substitution as a partial rather than a full mismatch, thereby increasing the percentage sequence identity. Thus, for example, where an identical amino acid is given a score of one and a non-conservative substitution is given a score of zero, a conservative substitution is given a score between zero and one. The scoring of conservative substitutions is calculated, e.g., as implemented in the program PC/GENE (Intelligenetics, Mountain View, Calif.).

[0096] As used herein, “percentage of sequence identity” means the value determined by comparing two optimally aligned sequences over a comparison window, wherein the portion of the polynucleotide sequence in the comparison window may comprise additions or deletions (i.e., gaps) as compared to the reference sequence (which does not comprise additions or deletions) for optimal alignment of the two sequences. The percentage is calculated by determining the number of positions at which the identical nucleic acid base or amino acid residue occurs in both sequences to yield the number of matched positions, dividing the number of matched positions by the total number of positions in the window of comparison, and multiplying the result by 100 to yield the percentage of sequence identity.

[0097] The term “substantial identity” of polynucleotide sequences means that a polynucleotide comprises a sequence that has at least 70% sequence identity, optimally at least 80%, more optimally at least 90% and most optimally at least 95%, compared to a reference sequence using an alignment program using standard parameters. One of skill in the art will recognize that these values can be appropriately adjusted to determine corresponding identity of proteins encoded by two nucleotide sequences by considering codon degeneracy, amino acid similarity, reading frame positioning and the like. Substantial identity of amino acid sequences for these purposes normally means sequence identity of at least 60%, 70%, 80%, 90% and at least 95%.

[0098] Another indication that nucleotide sequences are substantially identical is if two molecules hybridize to each other under stringent conditions. Generally, stringent conditions are selected to be about 5° C. lower than the Tm for the specific sequence at a defined ionic strength and pH. However, stringent conditions encompass temperatures in the range of about 1° C. to about 20° C. lower than the Tm, depending upon the desired degree of stringency as otherwise qualified herein. Nucleic acids that do not hybridize to each other under stringent conditions are still substantially identical if the polypeptides they encode are substantially identical. This may occur, e.g., when a copy of a nucleic acid is created using the maximum codon degeneracy permitted by the genetic code. One indication that two nucleic acid sequences are substantially identical is when the polypeptide encoded by the first nucleic acid is immunologically cross reactive with the polypeptide encoded by the second nucleic acid.

[0099] The sequences and genes disclosed herein, as well as variants and fragments thereof, are useful for the genetic engineering of plants, e.g. to produce a transformed or transgenic plant, to express a phenotype of interest. As used herein, the terms “transformed plant” and “transgenic plant” refer to a plant that comprises within its genome a heterologous polynucleotide. Generally, the heterologous polynucleotide is stably integrated within the genome of a transgenic or transformed plant such that the polynucleotide is passed on to successive generations. The heterologous polynucleotide may be integrated into the genome alone or as part of a recombinant DNA construct. It is to be understood that as used herein the term “transgenic” includes any cell, cell line, callus, tissue, plant part or plant the genotype of which has been altered by the presence of a heterologous nucleic acid including those transgenics initially so altered as well as those created by sexual crosses or asexual propagation from the initial transgenic.

[0100] A transgenic “event” is produced by transformation of plant cells with a heterologous DNA construct, including a nucleic acid expression cassette that comprises a gene of interest, the regeneration of a population of plants resulting from the insertion of the transferred gene into the genome of the plant and selection of a plant characterized by insertion into a particular genome location. An event is characterized phenotypically by the expression of the inserted gene. At the genetic level, an event is part of the genetic makeup of a plant. The term “event” also refers to progeny produced by a sexual cross between the transformant and another plant wherein the progeny include the heterologous DNA.

[0101] Transformation protocols as well as protocols for introducing nucleotide sequences into plants may vary depending on the type of plant or plant cell, i.e., monocot or dicot, targeted for transformation. Suitable methods of introducing nucleotide sequences into plant cells and subsequent insertion into the plant genome include microinjection (Crossway et al. (1986) Biotechniques 4:320-334), electroporation (Riggs et al. (1986) Proc. Natl. Acad. Sci. USA 83:5602-5606, Agrobacterium-mediated transformation (Townsend et al., U.S. Pat. No. 5,563,055; Zhao et al., U.S. Pat. No. 5,981,840), direct gene transfer (Paszkowski et al. (1984) EMBO J. 3:2717-2722), and ballistic particle acceleration (see, for example, Sanford et al., U.S. Pat. No. 4,945,050; Tomes et al., U.S. Pat. No. 5,879,918; Tomes et al., U.S. Pat. No. 5,886,244; Bidney et al., U.S. Pat. No. 5,932,782; Tomes et al. (1995) “Direct DNA Transfer into Intact Plant Cells via Microprojectile Bombardment,” in Plant Cell, Tissue, and Organ Culture: Fundamental Methods, ed. Gamborg and Phillips (Springer-Verlag, Berlin) (maize); McCabe et al. (1988) Biotechnology 6:923-926); and Lec transformation (WO 00/28058). Also see Weissinger et al. (1988) Ann. Rev. Genet. 22:421-477; Sanford et al. (1987) Particulate Science and Technology 5:27-37 (onion); Christou et al. (1988) Plant Physiol. 87:671-674 (soybean); McCabe et al. (1988) Bio/Technology 6:923-926 (soybean); Finer and McMullen (1991) In Vitro Cell Dev. Biol. 27P:175-182 (soybean); Singh et al. (1998) Theor. Appl. Genet. 96:319-324 (soybean); Datta et al. (1990) Biotechnology 8:736-740 (rice); Klein et al. (1988) Proc. Natl. Acad. Sci. USA 85:4305-4309 (maize); Klein et al. (1988) Biotechnology 6:559-563 (maize); Tomes, U.S. Pat. No. 5,240,855; Buising et al., U.S. Pat. Nos. 5,322,783 and 5,324,646; Klein et al. (1988) Plant Physiol. 91:440-444 (maize); Fromm et al. (1990) Biotechnology 8:833-839 (maize); Hooykaas-Van Slogteren et al. (1984) Nature (London) 311:763-764; Bowen et al., U.S. Pat. No. 5,736,369 (cereals); Bytebier et al. (1987) Proc. Natl. Acad. Sci. USA 84:5345-5349 (Liliaceae); De Wet et al. (1985) in The Experimental Manipulation of Ovule Tissues, ed. Chapman et al. (Longman, New York), pp. 197-209 (pollen); Kaeppler et al. (1990) Plant Cell Reports 9:415-418 and Kaeppler et al. (1992) Theor. Appl. Genet. 84:560-566 (whisker-mediated transformation); D'Halluin et al. (1992) Plant Cell 4:1495-1505 (electroporation); Li et al. (1993) Plant Cell Reports 12:250-255; Christou and Ford (1995) Annals of Botany 75:407-413 (rice); Osjoda et al. (1996) Nature Biotechnology 14:745-750 (maize via Agrobacterium tumefaciens); and US Patent Application Publication Number 2017/0121722 (rapid plant transformation) all of which are herein incorporated by reference in their entireties.

[0102] Nanocarrier-mediated gene delivery was first developed in mammalian systems but are rapidly gaining attention for delivery of nucleic acids into plants cells. Feasibility in plants was first demonstrated using mesoporous silica nanoparticles (˜200 nm diameter) coupled to gold particles for biolistic delivery (Torney et al. (2007) Nat Nanotechnol 2: 295-300). Developments in plant transformation also include delivery of DNA using polyethyleneimine-coated Fe₃O₄ magnetic nanoparticles (MNP) as carriers and applying a magnetic force to direct the MNP-DNA complexes into cotton pollen grains (Zhao et al. (2017) Nat Plants 3:956-964). As opposed to the above two methods that require an external force to transfer the particles into the plant cell, carbon nanotubes (CNTs) have been shown to diffuse into plant cells and can be chemically modified for DNA delivery into either the nucleus (Demirer et al. (2019) Nat Nanotechnol doi.org/10.1038/s41565-019-0382-5) or the chloroplast (Kwak et al. (2019) Nat Nanotechnol https://doi.org/10.1038/s41565-019-0375-4). In addition, CNTs have been used to successfully deliver siRNA into plant cells (Demirer et al. (2019) SSRN https://doi.org/10.2139/ssrn.3352632; Zhang (2019) Proc Natl Acad Sci 116, 7543-7548). These recent studies also show that associating nucleic acids with nanotubules for delivery into plant cells appears to protect DNA and RNA cargoes from degradation, potentially extending cargo lifetime.

[0103] Some of the methods provided herein rely upon the use of bacteria-mediated and/or biolistic-mediated gene transfer to produce regenerable plant cells having an incorporated nucleotide sequence of interest. Bacterial strains useful in the methods of the present disclosure include, but are not limited to, a disarmed Agrobacterium including, but are not limited to, AGL-1, EHA105, GV3101, LBA4404, LBA4404 THY−, and LBA4404 THY− Tn904−, an Ochrobactrum bacteria (see U.S. Pat. Pub. No. US20180216123A1) or a Rhizobiaceae bacteria (see U.S. Pat. No. 9,365,859).

[0104] Ochrobactrum bacterial strains useful in the present methods include, but are not limited to, those listed in Table 2.

TABLE 2
Ochrobactrum haywardense H1 NRRL Deposit B-67078
Ochrobactrum cytisi
Ochrobactrum daejeonense
Ochrobactrum oryzae
Ochrobactrum tritici LBNL124-A-10
HTG3-C-07
Ochrobactrum pecoris
Ochrobactrum ciceri
Ochrobactrum gallinifaecis
Ochrobactrum grignonense
Ochrobactrum guangzhouense
Ochrobactrum haematophilum
Ochrobactrum intermedium
Ochrobactrum lupini
Ochrobactrum pituitosum
Ochrobactrum pseudintermedium
Ochrobactrum pseudogrignonense
Ochrobactrum rhizosphaerae
Ochrobactrum thiophenivorans
Ochrobactrum tritici

[0105] Rhizobiaceae bacterial strains useful in the present methods include, but are not limited to, those listed in Table 3.

TABLE 3
Rhizobium lusitanum
Rhizobium rhizogenes
Agrobacterium rubi
Rhizobium multihospitium
Rhizobium tropici
Rhizobium miluonense
Rhizobium leguminosarum
Rhizobium leguminosarum bv. trifolii
Rhizobium leguminosarum bv. phaseoli
Rhizobium leguminosarum. bv. viciae
Rhizobium leguminosarum Madison
Rhizobium leguminosarum USDA2370
Rhizobium leguminosarum USDA2408
Rhizobium leguminosarum USDA2668
Rhizobium leguminosarum 2370G
Rhizobium leguminosarum 2370LBA
Rhizobium leguminosarum 2048G
Rhizobium leguminosarum 2048LBA
Rhizobium leguminosarum bv. phaseoli 2668G
Rhizobium leguminosarum bv. phaseoli 2668LBA
Rhizobium leguminosarum RL542C
Rhizobium etli USDA 9032
Rhizobium etli bv. phaseoli
Rhizobium endophyticum
Rhizobium tibeticum
Rhizobium etli
Rhizobium pisi
Rhizobium phaseoli
Rhizobium fabae
Rhizobium hainanense
Arthrobacter viscosus
Rhizobium alamii
Rhizobium mesosinicum
Rhizobium sullae
Rhizobium indigoferae
Rhizobium gallicum
Rhizobium yanglingense
Rhizobium mongolense
Rhizobium oryzae
Rhizobium loessense
Rhizobium tubonense
Rhizobium cellulosilyticum
Rhizobium soli
Neorhizobium galegae
Neorhizobium vignae
Neorhizobium huautlense
Neorhizobium alkalisoli
Aureimonas altamirensis
Aureimonas frigidaquae
Aureimonas ureilytica. Aurantimonas coralicida
Fulvimarina pelagi
Martelella mediterranea
Allorhizobium undicola
Allorhizobium vitis
Allorhizobium borbor
Beijerinckia fluminensis
Agrobacterium larrymoorei
Agrobacterium radiobacter
Rhizobium selenitireducens corrig. Rhizobium rosettiformans
Rhizobium daejeonense
Rhizobium aggregatum
Pararhizobium capsulatum
Pararhizobium giardinii
Ensifer mexicanus
Ensifer terangae
Ensifer saheli
Ensifer kostiensis
Ensifer kummerowiae
Ensifer fredii
Sinorhizobium americanum
Ensifer arboris
Ensifer garamanticus
Ensifer meliloti
Ensifer numidicus
Ensifer adhaerens
Sinorhizobium sp.
Sinorhizobium meliloti SD630
Sinorhizobium meliloti USDA1002
Sinorhizobium fredii USDA205
Sinorhizobium fredii SF542G
Sinorhizobium fredii SF4404
Sinorhizobium fredii SM542C.

[0106] Polynucleotides may be introduced into plants by contacting plants with a virus or viral nucleic acids. Generally, such methods involve incorporating a nucleotide construct of the present disclosure within a viral DNA or RNA molecule. Methods for introducing polynucleotides into plants and expressing a protein encoded therein, involving viral DNA or RNA molecules, are known in the art. See, for example, U.S. Pat. Nos. 5,889,191, 5,889,190, 5,866,785, 5,589,367, 5,316,931 and Porta, et al., (1996) Molecular Biotechnology 5:209-221, herein incorporated by reference in their entirety.

[0107] The methods of the present disclosure involve introducing a polypeptide or polynucleotide into a plant. As used herein, “introducing” means presenting to the plant the polynucleotide or polypeptide in such a manner that the sequence gains access to the interior of a cell of the plant. The methods of the present disclosure do not depend on a particular method for introducing a sequence into a plant, only that the polynucleotide or polypeptides gains access to the interior of at least one cell of the plant. Methods for introducing polynucleotide or polypeptides into plants are known in the art including, but not limited to, stable transformation methods, transient transformation methods and virus-mediated methods.

[0108] A “stable transformation” is a transformation in which a nucleotide construct or an expression cassette introduced into a plant integrates into the genome of the plant and is capable of being inherited by the progeny thereof. “Transient transformation” means that a polynucleotide or an expression cassette is introduced into the plant and does not integrate into the genome of the plant or that a polypeptide is introduced into a plant.

[0109] Reporter genes or selectable marker genes may also be included in the expression cassettes discloses herein and used in the methods of the present disclosure. Examples of suitable reporter genes known in the art can be found in, for example, Jefferson, et al., (1991) in Plant Molecular Biology Manual, ed. Gelvin, et al., (Kluwer Academic Publishers), pp. 1-33; DeWet, et al., (1987) Mol. Cell. Biol. 7:725-737; Goff, et al., (1990) EMBO J. 9:2517-2522; Kain, et al., (1995) Bio Techniques 19:650-655 and Chiu, et al., (1996) Current Biology 6:325-330, herein incorporated by reference in their entirety.

[0110] A selectable marker comprises a DNA segment that allows one to identify or select for or against a molecule or a cell that contains it, often under particular conditions. These markers can encode an activity, such as, but not limited to, production of RNA, peptide, or protein, or can provide a binding site for RNA, peptides, proteins, inorganic and organic compounds or compositions and the like. Examples of selectable markers include, but are not limited to, DNA segments that comprise restriction enzyme sites; DNA segments that encode products which provide resistance against otherwise toxic compounds (e.g., antibiotics, such as, spectinomycin, ampicillin, kanamycin, tetracycline, Basta, neomycin phosphotransferase II (NEO) and hygromycin phosphotransferase (HPT)); DNA segments that encode products which are otherwise lacking in the recipient cell (e.g., tRNA genes, auxotrophic markers); DNA segments that encode products which can be readily identified (e.g., phenotypic markers such as 0-galactosidase, GUS; fluorescent proteins such as green fluorescent protein (GFP), cyan (CFP), yellow (YFP), red (RFP), and cell surface proteins); the generation of new primer sites for PCR (e.g., the juxtaposition of two DNA sequence not previously juxtaposed), the inclusion of DNA sequences not acted upon or acted upon by a restriction endonuclease or other DNA modifying enzyme, chemical, etc.; and, the inclusion of a DNA sequences required for a specific modification (e.g., methylation) that allows its identification.

[0111] Selectable marker genes for selection of transformed cells or tissues can include genes that confer antibiotic resistance or resistance to herbicides. Examples of suitable selectable marker genes include, but are not limited to, genes encoding resistance to chloramphenicol (Herrera Estrella, et al., (1983) EMBO J. 2:987-992); methotrexate (Herrera Estrella, et al., (1983) Nature 303:209-213; Meijer, et al., (1991) Plant Mol. Biol. 16:807-820); hygromycin (Waldron, et al., (1985) Plant Mol. Biol. 5:103-108 and Zhijian, et al., (1995) Plant Science 108:219-227); streptomycin (Jones, et al., (1987) Mol. Gen. Genet. 210:86-91); spectinomycin (Bretagne-Sagnard, et al., (1996) Transgenic Res. 5:131-137); bleomycin (Hille, et al., (1990) Plant Mol. Biol. 7:171-176); sulfonamide (Guerineau, et al., (1990) Plant Mol. Biol. 15:127-36); bromoxynil (Stalker, et al., (1988) Science 242:419-423); glyphosate (Shaw, et al., (1986) Science 233:478-481 and U.S. patent application Ser. Nos. 10/004,357 and 10/427,692); phosphinothricin (DeBlock, et al., (1987) EMBO J. 6:2513-2518), herein incorporated by reference in their entirety.

[0112] Selectable markers that confer resistance to herbicidal compounds include genes encoding resistance and/or tolerance to herbicidal compounds, such as glyphosate, sulfonylureas, glufosinate ammonium, bromoxynil, imidazolinones, and 2,4-dichlorophenoxyacetate (2,4-D). See generally, Yarranton (1992) Curr. Opin. Biotech. 3:506-511; Christopherson et al. (1992) Proc. Natl. Acad. Sci. USA 89:6314-6318; Yao et al. (1992) Cell 71:63-72; Reznikoff (1992) Mol. Microbiol. 6:2419-2422; Barkley et al. (1980) in The Operon, pp. 177-220; Hu et al. (1987) Cell 48:555-566; Brown et al. (1987) Cell 49:603-612; Figge et al. (1988) Cell 52:713-722; Deuschle et al. (1989) Proc. Natl. Acad. Sci. USA 86:5400-5404; Fuerst et al. (1989) Proc. Natl. Acad. Sci. USA 86:2549-2553; Deuschle et al. (1990) Science 248:480-483; Gossen (1993) Ph.D. Thesis, University of Heidelberg; Reines et al. (1993) Proc. Natl. Acad. Sci. USA 90:1917-1921; Labow et al. (1990) Mol. Cell. Biol. 10:3343-3356; Zambretti et al. (1992) Proc. Natl. Acad. Sci. USA 89:3952-3956; Baim et al. (1991) Proc. Natl. Acad. Sci. USA 88:5072-5076; Wyborski et al. (1991) Nucleic Acids Res. 19:4647-4653; Hillen and Wissman (1989) Topics Mol. Struc. Biol. 10:143-162; Degenkolb et al. (1991) Antimicrob. Agents Chemother. 35:1591-1595; Kleinschnidt et al. (1988) Biochemistry 27:1094-1104; Bonin (1993) Ph.D. Thesis, University of Heidelberg; Gossen et al. (1992) Proc. Natl. Acad. Sci. USA 89:5547-5551; Oliva et al. (1992) Antimicrob. Agents Chemother. 36:913-919; Hlavka et al. (1985) Handbook of Experimental Pharmacology, Vol. 78 (Springer-Verlag, Berlin); Gill et al. (1988) Nature 334:721-724. Such disclosures are herein incorporated by reference.

[0113] Certain selectable markers useful in the present methods include, but are not limited to, the maize HRA gene (Lee et al., 1988, EMBO J 7:1241-1248) which confers resistance to sulfonylureas and imidazolinones, the GAT gene which confers resistance to glyphosate (Castle et al., 2004, Science 304:1151-1154), genes that confer resistance to spectinomycin such as the aadA gene (Svab et al., 1990, Plant Mol Biol. 14:197-205) and the bar gene that confers resistance to glufosinate ammonium (White et al., 1990, Nucl. Acids Res. 25:1062), and PAT (or moPAT for corn, see Rasco-Gaunt et al., 2003, Plant Cell Rep. 21:569-76) and the PMI gene that permits growth on mannose-containing medium (Negrotto et al., 2000, Plant Cell Rep. 22:684-690) are very useful for rapid selection during the brief elapsed time encompassed by somatic embryogenesis and embryo maturation of the method. However, depending on the selectable marker used and the crop, inbred or variety being transformed, the percentage of wild-type escapes can vary. In maize and sorghum, the HRA gene is efficacious in reducing the frequency of wild-type escapes.

[0114] Other genes that could have utility in the recovery of transgenic events would include, but are not limited to, examples such as GUS (beta-glucuronidase; Jefferson, (1987) Plant Mol. Biol. Rep. 5:387), GFP (green fluorescence protein; Chalfie, et al., (1994) Science 263:802), luciferase (Riggs, et al., (1987) Nucleic Acids Res. 15(19):8115 and Luehrsen, et al., (1992) Methods Enzymol. 216:397-414), various fluorescent proteins with a spectrum of alternative emission optima spanning Far-Red, Red, Orange, Yellow, Green Cyan and Blue (Shaner et al., 2005, Nature Methods 2:905-909) and the maize genes encoding for anthocyanin production (Ludwig, et al., (1990) Science 247:449), herein incorporated by reference in their entireties.

[0115] The above list of selectable markers is not meant to be limiting. Any selectable marker can be used in the methods of the present disclosure.

[0116] In an aspect, the methods of the present disclosure provide transformation methods that allow positive growth selection. One skilled in the art can appreciate that conventional plant transformation methods have relied predominantly on negative selection schemes as described above, in which an antibiotic or herbicide (a negative selective agent) is used to inhibit or kill non-transformed cells or tissues, and the transgenic cells or tissues continue to grow due to expression of a resistance gene. In contrast, the methods of the present disclosure can be used with no application of a negative selective agent. Thus, although wild-type cells can grow unhindered, by comparison cells impacted by the controlled expression of a morphogenic gene can be readily identified due to their accelerated growth rate relative to the surrounding wild-type tissue. In addition to simply observing faster growth, the methods of the present disclosure provide transgenic cells that exhibit more rapid morphogenesis relative to non-transformed cells. Accordingly, such differential growth and morphogenic development can be used to easily distinguish transgenic plant structures from the surrounding non-transformed tissue, a process which is termed herein as “positive growth selection.”

[0117] The present disclosure provides methods for producing transgenic plants with increased efficiency and speed and providing significantly higher transformation frequencies and significantly more quality events (events containing one copy of a trait gene expression cassette with no vector (plasmid) backbone) in multiple inbred lines using a variety of starting tissue types, including transformed inbreds representing a range of genetic diversities and having significant commercial utility. The disclosed methods can further comprise polynucleotides that provide for improved traits and characteristics.

[0118] As used herein, “trait” refers to a physiological, morphological, biochemical, or physical characteristic of a plant or particular plant material or cell. In some instances, this characteristic is visible to the human eye, such as seed or plant size, or can be measured by biochemical techniques, such as detecting the protein, starch, or oil content of seed or leaves, or by observation of a metabolic or physiological process, e.g. by measuring uptake of carbon dioxide, or by the observation of the expression level of a gene or genes, e.g., by employing Northern analysis, RT-PCR, microarray gene expression assays, or reporter gene expression systems, or by agricultural observations such as stress tolerance, yield, or pathogen tolerance.

[0119] Agronomically important traits such as oil, starch, and protein content can be genetically altered in addition to using traditional breeding methods. Modifications include increasing content of oleic acid, saturated and unsaturated oils, increasing levels of lysine and sulfur, providing essential amino acids, and also modification of starch. Hordothionin protein modifications are described in U.S. Pat. Nos. 5,703,049, 5,885,801, 5,885,802, and 5,990,389, herein incorporated by reference. Another example is lysine and/or sulfur rich seed protein encoded by the soybean 2S albumin described in U.S. Pat. No. 5,850,016, and the chymotrypsin inhibitor from barley, described in Williamson et al. (1987) Eur. J. Biochem. 165:99-106, the disclosures of which are herein incorporated by reference.

[0120] Derivatives of the coding sequences can be made by site-directed mutagenesis to increase the level of preselected amino acids in the encoded polypeptide. For example, methionine-rich plant proteins such as from sunflower seed (Lilley et al. (1989) Proceedings of the World Congress on Vegetable Protein Utilization in Human Foods and Animal Feedstuffs, ed. Applewhite (American Oil Chemists Society, Champaign, Ill.), pp. 497-502; herein incorporated by reference); corn (Pedersen et al. (1986) J. Biol. Chem. 261:6279; Kirihara et al. (1988) Gene 71:359; both of which are herein incorporated by reference); and rice (Musumura et al. (1989) Plant Mol. Biol. 12:123, herein incorporated by reference) could be used. Other agronomically important genes encode latex, Floury 2, growth factors, seed storage factors, and transcription factors.

[0121] Many agronomic traits can affect “yield”, including without limitation, plant height, pod number, pod position on the plant, number of internodes, incidence of pod shatter, grain size, efficiency of nodulation and nitrogen fixation, efficiency of nutrient assimilation, resistance to biotic and abiotic stress, carbon assimilation, plant architecture, resistance to lodging, percent seed germination, seedling vigor, and juvenile traits. Other traits that can affect yield include, efficiency of germination (including germination in stressed conditions), growth rate (including growth rate in stressed conditions), ear number, seed number per ear, seed size, composition of seed (starch, oil, protein) and characteristics of seed fill. Also of interest is the generation of transgenic plants that demonstrate desirable phenotypic properties that may or may not confer an increase in overall plant yield. Such properties include enhanced plant morphology, plant physiology or improved components of the mature seed harvested from the transgenic plant.

[0122] “Increased yield” of a transgenic plant of the present disclosure may be evidenced and measured in a number of ways, including test weight, seed number per plant, seed weight, seed number per unit area (i.e. seeds, or weight of seeds, per acre), bushels per acre, tons per acre, kilo per hectare. For example, maize yield may be measured as production of shelled corn kernels per unit of production area, e.g. in bushels per acre or metric tons per hectare, often reported on a moisture adjusted basis, e.g., at 15.5% moisture. Increased yield may result from improved utilization of key biochemical compounds, such as nitrogen, phosphorous and carbohydrate, or from improved tolerance to environmental stresses, such as cold, heat, drought, salt, and attack by pests or pathogens. Trait-enhancing recombinant DNA may also be used to provide transgenic plants having improved growth and development, and ultimately increased yield, as the result of modified expression of plant growth regulators or modification of cell cycle or photosynthesis pathways.

[0123] An “enhanced trait” as used in describing the aspects of the present disclosure includes improved or enhanced water use efficiency or drought tolerance, osmotic stress tolerance, high salinity stress tolerance, heat stress tolerance, enhanced cold tolerance, including cold germination tolerance, increased yield, improved seed quality, enhanced nitrogen use efficiency, early plant growth and development, late plant growth and development, enhanced seed protein, and enhanced seed oil production.

[0124] Any polynucleotide of interest or trait gene can be used in the methods of the present disclosure. Various changes in phenotype, imparted by a gene of interest or trait gene, include those for modifying the fatty acid composition in a plant, altering the amino acid content, starch content, or carbohydrate content of a plant, altering a plant's pathogen defense mechanism, altering kernel size, altering sucrose loading, and the like. The gene of interest or trait gene may also be involved in regulating the influx of nutrients, and in regulating expression of phytate genes particularly to lower phytate levels in the seed. These results can be achieved by providing expression of heterologous products or increased expression of endogenous products in plants. Alternatively, the results can be achieved by providing for a reduction of expression of one or more endogenous products, particularly enzymes or cofactors in the plant. These changes result in a change in phenotype of the transformed plant.

[0125] As used herein, “trait gene” means a gene of interest to be integrated into the plant genome to produce a fertile transgenic TO plant. Selectable markers such as the Highly-Resistant Acetolactate Synthase (HRA) and visual makers such as fluorescent protein genes are used herein by way of example. A trait gene could be any gene (or combination of genes) that confer a value-added agronomic, physiological, biochemical, or physical phenotype.

[0126] Genes of interest/trait genes are reflective of the commercial markets and interests of those involved in the development of the crop. Crops and markets of interest change, and as developing nations open up world markets, new crops and technologies will emerge also. In addition, as the understanding of agronomic traits and characteristics such as yield and heterosis increase, the choice of genes and traits for transformation will change accordingly. General categories of nucleotide sequences or genes of interest or trait genes useful in the methods of the present disclosure include, for example, those genes involved in information, such as zinc fingers, those involved in communication, such as kinases, and those involved in housekeeping, such as heat shock proteins. More specific categories of transgenes, for example, include genes encoding important traits for agronomics, insect resistance, disease resistance, herbicide resistance, sterility, environmental stress resistance (altered tolerance to cold, salt, drought, etc.), grain characteristics, and commercial products.

[0127] Heterologous coding sequences, heterologous polynucleotides, and polynucleotides of interest expressed by a promoter sequence transformed by the methods disclosed herein may be used for varying the phenotype of a plant. Various changes in phenotype are of interest including modifying expression of a gene in a plant, altering a plant's pathogen or insect defense mechanism, increasing a plant's tolerance to herbicides, altering plant development to respond to environmental stress, modulating the plant's response to salt, temperature (hot and cold), drought and the like. These results can be achieved by the expression of a heterologous nucleotide sequence of interest comprising an appropriate gene product. In specific aspects, the heterologous nucleotide sequence of interest is an endogenous plant sequence whose expression level is increased in the plant or plant part. Results can be achieved by providing for altered expression of one or more endogenous gene products, particularly hormones, receptors, signaling molecules, enzymes, transporters or cofactors or by affecting nutrient uptake in the plant. These changes result in a change in phenotype of the transformed plant. Still other categories of transgenes include genes for inducing expression of exogenous products such as enzymes, cofactors, and hormones from plants and other eukaryotes as well as prokaryotic organisms.

[0128] It is recognized that any gene of interest, polynucleotide of interest, trait gene or multiple genes/polynucleotides/traits of interest can be operably linked to a promoter or promoters and expressed in a plant transformed by the methods disclosed herein, for example insect resistance trait genes which can be stacked with one or more additional input trait genes (e.g., herbicide resistance, fungal resistance, virus resistance, stress tolerance, disease resistance, male sterility, stalk strength, and the like) or output trait genes (e.g., increased yield, modified starches, improved oil profile, balanced amino acids, high lysine or methionine, increased digestibility, improved fiber quality, drought resistance, and the like).

[0129] A promoter can be operably linked to agronomically important trait genes for expression in plants transformed by the methods disclosed herein that affect quality of grain, such as levels (increasing content of oleic acid) and types of oils, saturated and unsaturated, quality and quantity of essential amino acids, increasing levels of lysine and sulfur, levels of cellulose, and starch and protein content. A promoter can be operably linked to trait genes providing hordothionin protein modifications for expression in plants transformed by the methods disclosed herein which are described in U.S. Pat. Nos. 5,990,389; 5,885,801; 5,885,802 and 5,703,049; herein incorporated by reference in their entirety. Another example of a trait gene to which a promoter can be operably linked to for expression in plants transformed by the methods disclosed herein is a lysine and/or sulfur rich seed protein encoded by the soybean 2S albumin described in U.S. Pat. No. 5,850,016, and the chymotrypsin inhibitor from barley, Williamson, et al., (1987) Eur. J. Biochem 165:99-106, the disclosures of which are herein incorporated by reference in their entirety.

[0130] A promoter can be operably linked to insect resistance trait genes that encode resistance to pests that have yield drag such as rootworm, cutworm, European corn borer and the like for expression in plants transformed by the methods disclosed herein. Such genes include, for example, Bacillus thuringiensis toxic protein genes, U.S. Pat. Nos. 5,366,892; 5,747,450; 5,736,514; 5,723,756; 5,593,881 and Geiser, et al., (1986) Gene 48:109, the disclosures of which are herein incorporated by reference in their entirety. Trait genes encoding disease resistance traits that can be operably linked to a promoter for expression in plants transformed by the methods disclosed herein include, for example, detoxification genes, such as those which detoxify fumonisin (U.S. Pat. No. 5,792,931); avirulence (avr) and disease resistance (R) genes (Jones, et al., (1994) Science 266:789; Martin, et al., (1993) Science 262:1432; and Mindrinos, et al., (1994) Cell 78:1089), herein incorporated by reference in their entirety.

[0131] Herbicide resistance trait genes that can be operably linked to a promoter for expression in plants transformed by the methods disclosed herein include genes coding for resistance to herbicides that act to inhibit the action of acetolactate synthase (ALS), in particular the sulfonylurea-type herbicides (e.g., the acetolactate synthase (ALS) gene containing mutations leading to such resistance, in particular the S4 and/or Hra mutations), genes coding for resistance to herbicides that act to inhibit action of glutamine synthase, such as phosphinothricin or basta (e.g., the bar gene), genes coding for resistance to glyphosate (e.g., the EPSPS gene and the GAT gene; see, for example, US Patent Application Publication Number 2004/0082770, WO 03/092360 and WO 05/012515, herein incorporated by reference in their entirety) or other such genes known in the art. The bar gene encodes resistance to the herbicide basta, the nptII gene encodes resistance to the antibiotics kanamycin and geneticin and the ALS-gene mutants encode resistance to the herbicide chlorsulfuron any and all of which can be operably linked to a promoter for expression in plants transformed by the methods disclosed herein.

[0132] Glyphosate resistance is imparted by mutant 5-enolpyruvl-3-phosphikimate synthase (EPSPS) and aroA genes which can be operably linked to a promoter for expression in plants transformed by the methods disclosed herein. See, for example, U.S. Pat. No. 4,940,835 to Shah, et al., which discloses the nucleotide sequence of a form of EPSPS which can confer glyphosate resistance. U.S. Pat. No. 5,627,061 to Barry, et al., also describes genes encoding EPSPS enzymes which can be operably linked to a promoter for expression in plants transformed by the methods disclosed herein. See also, U.S. Pat. Nos. 6,248,876 B1; 6,040,497; 5,804,425; 5,633,435; 5,145,783; 4,971,908; 5,312,910; 5,188,642; 4,940,835; 5,866,775; 6,225,114 B1; 6,130,366; 5,310,667; 4,535,060; 4,769,061; 5,633,448; 5,510,471; Re. 36,449; RE 37,287 E and 5,491,288 and international publications WO 97/04103; WO 97/04114; WO 00/66746; WO 01/66704; WO 00/66747 and WO 00/66748, which are incorporated herein by reference in their entirety. Glyphosate resistance is also imparted to plants that express a gene which can be operably linked to a promoter for expression in plants transformed by the methods disclosed herein that encodes a glyphosate oxido-reductase enzyme as described more fully in U.S. Pat. Nos. 5,776,760 and 5,463,175, which are incorporated herein by reference in their entirety. Glyphosate resistance can also be imparted to plants by the over expression of genes which can be operably linked to a promoter for expression in plants transformed by the methods disclosed herein encoding glyphosate N-acetyltransferase. See, for example, US Patent Application Publication Number 2004/0082770, WO 03/092360 and WO 05/012515, herein incorporated by reference in their entirety.

[0133] Sterility genes operably linked to a promoter for expression in plants transformed by the methods disclosed herein can also be encoded in a DNA construct and provide an alternative to physical detasseling. Examples of genes used in such ways include male tissue-preferred genes and genes with male sterility phenotypes such as QM, described in U.S. Pat. No. 5,583,210, herein incorporated by reference in its entirety. Other genes which can be operably linked to a promoter for expression in plants transformed by the methods disclosed herein include kinases and those encoding compounds toxic to either male or female gametophytic development.

[0134] Commercial traits can also be encoded by a gene or genes operably linked to a promoter for expression in plants transformed by the methods disclosed herein that could increase for example, starch for ethanol production, or provide expression of proteins. Another important commercial use of transformed plants is the production of polymers and bioplastics such as described in U.S. Pat. No. 5,602,321, herein incorporated by reference in its entirety. Genes such as β-Ketothiolase, PHBase (polyhydroxybutyrate synthase), and acetoacetyl-CoA reductase, which facilitate expression of polyhydroxyalkanoates (PHAs) can be operably linked to a promoter for expression in plants transformed by the methods disclosed herein (see, Schubert, et al., (1988) J. Bacteriol. 170:5837-5847, herein incorporated by reference in its entirety).

[0135] Examples of other applicable trait genes and their associated phenotype which can be operably linked to a promoter for expression in plants transformed by the methods disclosed herein include genes that encode viral coat proteins and/or RNAs, or other viral or plant genes that confer viral resistance; genes that confer fungal resistance; genes that promote yield improvement; and genes that provide for resistance to stress, such as cold, dehydration resulting from drought, heat and salinity, toxic metal or trace elements or the like.

[0136] Numerous trait genes are known in the art and can be used in the methods disclosed herein. By way of illustration, without intending to be limiting, trait genes that confer resistance to insects or diseases, trait genes that confer resistance to a herbicide, trait genes that confer or contribute to an altered grain characteristic, such as altered fatty acids, altered phosphorus content, altered carbohydrates or carbohydrate composition, altered antioxidant content or composition, or altered essential seed amino acids content or composition are examples of the types of trait genes which can be operably linked to a promoter for expression in plants transformed by the methods disclosed herein. Additional genes known in the art may be included in the expression cassettes useful in the methods disclosed herein. Non-limiting examples include genes that create a site for site specific DNA integration, genes that affect abiotic stress resistance (including but not limited to flowering, ear and seed development, enhancement of nitrogen utilization efficiency, altered nitrogen responsiveness, drought resistance or tolerance, cold resistance or tolerance, and salt resistance or tolerance) and increased yield under stress, or other genes and transcription factors that affect plant growth and agronomic traits such as yield, flowering, plant growth and/or plant structure.

[0137] As used herein, “antisense orientation” includes reference to a polynucleotide sequence that is operably linked to a promoter in an orientation where the antisense strand is transcribed. The antisense strand is sufficiently complementary to an endogenous transcription product such that translation of the endogenous transcription product is often inhibited. “Operably linked” refers to the association of two or more nucleic acid fragments on a single nucleic acid fragment so that the function of one is affected by the other. For example, a promoter is operably linked with a coding sequence when it is capable of affecting the expression of that coding sequence (i.e., that the coding sequence is under the transcriptional control of the promoter). Coding sequences can be operably linked to regulatory sequences in sense or antisense orientation.

[0138] A heterologous nucleotide sequence operably linked to a promoter and its related biologically active fragments or variants useful in the methods disclosed herein may be an antisense sequence for a targeted gene. The terminology “antisense DNA nucleotide sequence” is intended to mean a sequence that is in inverse orientation to the 5′-to-3′ normal orientation of that nucleotide sequence. When delivered into a plant cell, expression of the antisense DNA sequence prevents normal expression of the DNA nucleotide sequence for the targeted gene. The antisense nucleotide sequence encodes an RNA transcript that is complementary to and capable of hybridizing to the endogenous messenger RNA (mRNA) produced by transcription of the DNA nucleotide sequence for the targeted gene. In this case, production of the native protein encoded by the targeted gene is inhibited to achieve a desired phenotypic response. Modifications of the antisense sequences may be made as long as the sequences hybridize to and interfere with expression of the corresponding mRNA. In this manner, antisense constructions having 70%, 80%, 85% sequence identity to the corresponding antisense sequences may be used. Furthermore, portions of the antisense nucleotides may be used to disrupt the expression of the target gene. Generally, sequences of at least 50 nucleotides, 100 nucleotides, 200 nucleotides or greater may be used. Thus, a promoter may be operably linked to antisense DNA sequences to reduce or inhibit expression of a native protein in the plant when transformed by the methods disclosed herein.

[0139] “RNAi” refers to a series of related techniques to reduce the expression of genes (see, for example, U.S. Pat. No. 6,506,559, herein incorporated by reference in its entirety). Older techniques referred to by other names are now thought to rely on the same mechanism but are given different names in the literature. These include “antisense inhibition,” the production of antisense RNA transcripts capable of suppressing the expression of the target protein and “co-suppression” or “sense-suppression,” which refer to the production of sense RNA transcripts capable of suppressing the expression of identical or substantially similar foreign or endogenous genes (U.S. Pat. No. 5,231,020, incorporated herein by reference in its entirety). Such techniques rely on the use of constructs resulting in the accumulation of double stranded RNA with one strand complementary to the target gene to be silenced.

[0140] As used herein, the terms “promoter” or “transcriptional initiation region” mean a regulatory region of DNA usually comprising a TATA box or a DNA sequence capable of directing RNA polymerase II to initiate RNA synthesis at the appropriate transcription initiation site for a particular coding sequence. A promoter may additionally comprise other recognition sequences generally positioned upstream or 5′ to the TATA box or the DNA sequence capable of directing RNA polymerase II to initiate RNA synthesis, referred to as upstream promoter elements, which influence the transcription initiation rate.

[0141] The transcriptional initiation region, the promoter, may be native or homologous or foreign or heterologous to the host, or could be the natural sequence or a synthetic sequence. By foreign is intended that the transcriptional initiation region is not found in the wild-type host into which the transcriptional initiation region is introduced. Either a native or heterologous promoter may be used with respect to the coding sequence of interest.

[0142] The transcriptional (expression) cassette will include in the 5′-3′ direction of transcription, a transcriptional and translational initiation region, a DNA sequence of interest/trait gene, and a transcriptional and translational termination region functional in plants. The termination region may be native with the transcriptional initiation region, may be native with the DNA sequence of interest, or may be derived from another source. Convenient termination regions are available from the potato proteinase inhibitor (PinII) gene or sequences from Ti-plasmid of A. tumefaciens, such as the nopaline synthase, octopine synthase and opaline synthase termination regions. See also, Guerineau et al., (1991) Mol. Gen. Genet. 262: 141-144; Proudfoot (1991) Cell 64: 671-674; Sanfacon et al. (1991) Genes Dev. 5: 141-149; Mogen et al. (1990) Plant Cell 2: 1261-1272; Munroe et al. (1990) Gene 91: 151-158; Ballas et al. 1989) Nucleic Acids Res. 17: 7891-7903; Joshi et al. (1987) Nucleic Acid Res. 15: 9627-9639.

[0143] The expression cassettes may additionally contain 5′ leader sequences in the expression cassette construct. Such leader sequences can act to enhance translation. Translation leaders are known in the art and include: picornavirus leaders, for example, EMCV leader (Encephalomyocarditis 5′noncoding region) (Elroy-Stein, O., Fuerst, T. R., and Moss, B. (1989) PNAS USA, 86: 6126-6130); potyvirus leaders, for example, TEV leader (Tobacco Etch Virus) (Allison et al. (1986); MDMV leader (Maize Dwarf Mosaic Virus); Virology, 154: 9-20), and human immunoglobulin heavy-chain binding protein (BiP), (Macejak, D. G., and P. Sarnow (1991) Nature, 353: 90-94; untranslated leader from the coat protein MARNA of alfalfa mosaic virus (AMV RNA 4), (Jobling, S. A., and Gehrke, L., (1987) Nature, 325: 622-625; tobacco mosaic virus leader (TMV), (Gallie et al. (1989) Molecular Biology of RNA, pages 237-256, Gallie et al. (1987) Nucl. Acids Res. 15: 3257-3273; maize chlorotic mottle virus leader (MCMV) (Lornmel, S. A. et al. (1991) Virology, 81: 382-385). See also, Della-Cioppa et al. (1987) Plant Physiology, 84: 965-968; and endogenous maize 5′ untranslated sequences. Other methods known to enhance translation and to enhance mRNA stability can also be utilized, for example, introns, such as the maize Ubiquitin intron (Christensen and Quail, (1996) Transgenic Res. 5:213-218; Christensen, et al., (1992) Plant Molecular Biology 18:675-689) or the maize AdhI intron (Kyozuka, et al., (1991) Mol. Gen. Genet. 228:40-48; Kyozuka, et al., (1990) Maydica 35:353-357) and the like, herein incorporated by reference in their entirety.

[0144] The expression cassettes may contain one or more than one gene or nucleic acid sequence to be transferred and expressed in the transformed plant. Thus, each nucleic acid sequence will be operably linked to 5′ and 3′ regulatory sequences. Alternatively, multiple expression cassettes may be provided.

[0145] In preparing expression cassettes useful in the methods of the present disclosure, the various DNA fragments may be manipulated, to provide for the DNA sequences in the proper orientation and, as appropriate, in the proper reading frame. Toward this end, adapters or linkers may be employed to join the DNA fragments or other manipulations may be involved to provide for convenient restriction sites, removal of superfluous DNA, removal of restriction sites or the like. For this purpose, in vitro mutagenesis, primer repair, restriction, annealing, resubstitutions, for example, transitions and transversions, may be involved.

[0146] The morphogenic genes and/or trait genes/polynucleotides of interest introduced into an explant by the disclosed methods can be operably linked to a suitable promoter. A “plant promoter” is a promoter capable of initiating transcription in plant cells whether or not its origin is a plant cell. Exemplary plant promoters include, but are not limited to, those that are obtained from plants, plant viruses, and bacteria which comprise genes expressed in plant cells such as from Agrobacterium or Rhizobium. Examples of promoters under developmental control include promoters that preferentially initiate transcription in certain tissues, such as leaves, roots, or seeds. Such promoters are referred to as “tissue preferred”. Promoters which initiate transcription only in certain tissues are referred to as “tissue specific”. A “cell type” specific promoter primarily drives expression in certain cell types in one or more organs, for example, vascular cells in roots or leaves. Tissue specific, tissue preferred, cell type specific, and inducible promoters constitute the class of “non-constitutive” promoters.

[0147] An “inducible” or “repressible” promoter can be a promoter which is under either environmental or exogenous control. Examples of environmental conditions that may affect transcription by inducible promoters include anaerobic conditions, or certain chemicals, or the presence of light. Alternatively, exogenous control of an inducible or repressible promoter can be affected by providing a suitable chemical or other agent that via interaction with target polypeptides result in induction or repression of the promoter. Inducible promoters include heat-inducible promoters, estradiol-responsive promoters, chemical inducible promoters, and the like. Pathogen inducible promoters include those from pathogenesis-related proteins (PR proteins), which are induced following infection by a pathogen; e. g., PR proteins, SAR proteins, beta-1,3-glucanase, chitinase, etc. See, for example, Redolfi et al. (1983) Neth. J. Plant Pathol. 89: 245-254; Uknes et al. (1992) The Plant Cell 4: 645-656; and Van Loon (1985) Plant Mol. Virol. 4: 111-116. Inducible promoters useful in the present methods include GLB1, OLE, LTP2, HSP17.7, HSP26, HSP18A, and XVE promoters.

[0148] A chemically-inducible promoter can be repressed by the tetracycline repressor (TETR), the ethametsulfuron repressor (ESR), or the chlorsulfuron repressor (CSR), and de-repression occurs upon addition of tetracycline-related or sulfonylurea ligands. The repressor can be TETR and the tetracycline-related ligand is doxycycline or anhydrotetracycline. (Gatz, C., Frohberg, C. and Wendenburg, R. (1992) Stringent repression and homogeneous de-repression by tetracycline of a modified CaMV 35S promoter in intact transgenic tobacco plants, Plant J. 2, 397-404). Alternatively, the repressor can be ESR and the sulfonylurea ligand is ethametsulfuron, chlorsulfuron, metsulfuron-methyl, sulfometuron methyl, chlorimuron ethyl, nicosulfuron, primisulfuron, tribenuron, sulfosulfuron, trifloxysulfuron, foramsulfuron, iodosulfuron, prosulfuron, thifensulfuron, rimsulfuron, mesosulfuron, or halosulfuron (US20110287936 incorporated herein by reference in its entirety). If the repressor is CSR, the CSR ligand is chlorsulfuron. See, U.S. Pat. No. 8,580,556 incorporated herein by reference in its entirety.

[0149] A “constitutive” promoter is a promoter which is active under most conditions. Promoters useful in the present disclosure include those disclosed in WO2017/112006 and those disclosed in U.S. Provisional Application 62/562,663. Constitutive promoters for use in expression of genes in plants are known in the art. Such promoters include but are not limited to 35S promoter of cauliflower mosaic virus (Depicker et al. (1982) Mol. Appl. Genet. 1: 561-573; Odell et al. (1985) Nature 313: 810-812), ubiquitin promoter (Christensen et al. (1992) Plant Mol. Biol. 18: 675-689), promoters from genes such as ribulose bisphosphate carboxylase (De Almeida et al. (1989) Mol. Gen. Genet. 218: 78-98), actin (McElroy et al. (1990) Plant J. 2: 163-171), histone, DnaJ (Baszczynski et al. (1997) Maydica 42: 189-201), and the like. In various aspects, constitutive promoters useful in the methods of the present disclosure include UBI, LLDAV, EVCV, DMMV, BSV (AY) PRO, CYMV PRO FL, UBIZM PRO, SI-UB3 PRO, SB-UBI PRO (ALT1), USB1ZM PRO, ZM-GOS2 PRO, ZM-H1B PRO (1.2 KB), IN2-2, NOS, the −135 version of 35S, and ZM-ADF PRO (ALT2) promoters.

[0150] Promoters useful in the present disclosure, listed in Table 4 below, include those disclosed in U.S. Pat. Pub. No. US20170121722, U.S. Pat. Pub. No. US20180371480 and U.S. Pat. No. 8,710,206, herein incorporated by reference in their entirety.

TABLE 4

| Name | Description |
|---|---|
| ZM-PLTP | Z. mays PLTP promoter |
| SB-PLTP1 | Sorghum bicolor PLTP 1 promoter |
| ZM-FBP1 | Z. mays promoter for Fructose-1,6-bisphosphatase |
| ZM-RFP | Z. mays promoter for NAD(P)-binding Rossmann-Fold Protein |
| ZM-APMP | Z. mays promoter for adipocyte plasma membrane-associated |
| | protein-like protein |
| ZM-RfeSP | Z. mays promoter for Rieske [2Fe-2S] iron-sulphur domain protein |
| ZM-CRR6 | Z. mays promoter for Chlororespiratory reduction 6 gene |
| ZM-GLYK | Z. mays promoter for D-glycerate 3-kinase, chloroplastic-like |
| | protein gene |
| ZM-CAB7 | Z. mays promoter for Chlorophyll a-b binding protein 7, |
| | chloroplastic-like protein |
| ZM-UBR | Z. mays promoter for Ultraviolet-B-repressible protein gene |
| ZM-HBP | Z. mays promoter for Soul heme-binding family protein |
| ZM-PSAN | Z. mays promoter for Photosystem I reaction center subunit psi-N |
| ZM-SDR | Z. mays promoter for Short-chain dehydrogenase/reductase |
| AXIG1 | AXIG1 promoter |
| DR5 | DR5 promoter |
| ZM-PLTP1 | Z. mays PLTP1 promoter |
| ZM-PLTP2 | Z. mays PLTP2 promoter |
| SB-PLTP2 | Sorghum bicolor PLTP2 promoter |
| SB-PLTP3 | Sorghum bicolor PLTP3 promoter |
| SI-PLTP1 | Setaria italica PLTP promoter |
| OS-PLTP1 | Oryza sativa PLTP promoter e |
| OS-PLTP2 | Oryza sativa PLTP2 promoter |
| ZM-LGL PRO | Z. mays promoter for the lactoylglutathione lyase gene |
| ZM-LEA14-A PRO | Z. mays promoter for gene encoding late embryogenic abundant |
| | protein Lea-14-A |
| ZM-LEA34-D PRO | Z. mays promoter for gene encoding late embryogenic abundant |
| | protein Lea34-D |
| ZM-SDR PRO (long) | Z. mays promoter for the short-chain dehydrogenase/reductase |
| | (long) |
| OS-SDR PRO | O. sativa promoter for the short-chain dehydrogenase/reductase |
| SB-SDR PRO | S. bicolor promoter for the short-chain dehydrogenase/reductase |
| GM-EF1A PRO | Glycine max EF1A promoter |

[0151] Additional promoters useful in the methods of the present disclosure are listed in Table 5 below.

TABLE 5

| SEQ ID | | |
|---|---|---|
| NO: | Promoter Name | Description |
| 35 | GM-HBSTART3 | Glycine max HBSTART3 (Homeodomain StAR- |
| | | related lipid transfer3) promoter sequence |
| 36 | GM-HBSTART3 | Glycine max HBSTART3 (Homeodomain StAR- |
| | (TRUNCATED) | related lipid transfer3) promoter sequence |
| | | (TRUNCATED) |
| 37 | AT-ML1 | Arabidopsis thaliana ML1 (MERISTEM LAYER1) |
| | | promoter sequence |
| 38 | GM-ML1-Like | Glycine max ML1-Like (MERISTEM LAYER1-Like) |
| | | promoter sequence |
| 39 | GM-ML1-Like | Glycine max ML1-Like (MERISTEM LAYER1-Like) |
| | (TRUNCATED) | promoter sequence (TRUNCATED) |
| 40 | ZM-HBSTART3 | Zea mays HBSTART3 (Homeodomain StAR-related |
| | | lipid transfer3) promoter sequence |
| 41 | OS-HBSTART3 | Oryza sativa HBSTART3 (Homeodomain StAR- |
| | | related lipid transfer3) promoter sequence |
| 42 | AT-PDF1 | Arabidopsis thaliana PDF1 (PROTODERMAL |
| | | FACTOR1) promoter sequence |
| 43 | GM-PDF1 | Glycine max PDF1 (PROTODERMAL FACTOR1) |
| | | promoter sequence |
| 44 | GM-PDF1 | Glycine max PDF1 (PROTODERMAL FACTOR1) |
| | (TRUNCATED) | promoter sequence (TRUNCATED) |
| 45 | SB-PDF1 | Sorghum bicolor PDF1 (PROTODERMAL |
| | | FACTOR1) promoter sequence |
| 46 | OS-PDF1 | Oryza sativa PDF1 (PROTODERMAL FACTOR1) |
| | | promoter sequence |
| 47 | OS-PDF1 | Oryza sativa PDF1 (PROTODERMAL FACTOR1) |
| | (TRUNCATED) | promoter sequence (TRUNCATED) |
| 48 | PT-PDF 1 | Populus trichocarpa PDF1 (PROTODERMAL |
| | | FACTOR1) promoter sequence |
| 49 | PT-PDF 1 | Populus trichocarpa PDF1 (PROTODERMAL |
| | (TRUNCATED) | FACTOR1) promoter sequence (TRUNCATED) |
| 50 | SI-PDF1 | Setaria italica PDF1 (PROTODERMAL FACTOR1) |
| | | promoter sequence |
| 51 | SI-PDF1 | Setaria italica PDF1 (PROTODERMAL FACTOR1) |
| | (TRUNCATED) | promoter sequence (TRUNCATED) |
| 52 | AT-PDF2 | Arabidopsis thaliana PDF2 (PROTODERMAL |
| | | FACTOR2) promoter sequence |
| 53 | GM-PDF2 | Glycine max PDF2 (PROTODERMAL FACTOR2) |
| | | promoter sequence |
| 54 | GM-PDF2 | Glycine max PDF2 (PROTODERMAL FACTOR2) |
| | (TRUNCATED) | promoter sequence (TRUNCATED) |
| 55 | ZM-GL1 | Zea mays GL1 (GLABROUS1) promoter sequence |
| 56 | AT-PDF2a | Arabidopsis thaliana PDF2a (PROTODERMAL |
| | | FACTOR2a) promoter sequence |
| 57 | AT-PDF2a | Arabidopsis thaliana PDF2a (PROTODERMAL |
| | (TRUNCATED) | FACTOR2a) promoter sequence (TRUNCATED) |
| 58 | GM-PDF2a | Glycine max PDF2a (PROTODERMAL FACTOR2a) |
| | | promoter sequence |
| 59 | GM-PDF2a | Glycine max PDF2a (PROTODERMAL FACTOR2a) |
| | (TRUNCATED) | promoter sequence (TRUNCATED) |
| 60 | OS-PDF2 | Oryza sativa PDF2 (PROTODERMAL FACTOR2) |
| | | promoter sequence |
| 61 | OS-PDF2 | Oryza sativa PDF2 (PROTODERMAL FACTOR2) |
| | (TRUNCATED) | promoter sequence (TRUNCATED) |
| 62 | PT-PDF2 | Populus trichocarpa PDF2 (PROTODERMAL |
| | | FACTOR2) promoter sequence) |
| 63 | PT-PDF2 | Populus trichocarpa PDF2 (PROTODERMAL |
| | (TRUNCATED) | FACTOR2) promoter sequence (TRUNCATED) |
| 64 | VV-PDF2 | Vitus vinifera PDF2 (PROTODERMAL FACTOR2) |
| | | promoter sequence |
| 65 | VV-PDF2 | Vitus vinifera PDF2 (PROTODERMAL FACTOR2) |
| | (TRUNCATED) | promoter sequence (TRUNCATED) |
| 66 | ZM-PDF2 | Zea mays PDF2 (PROTODERMAL FACTOR2) |
| | | promoter sequence |
| 67 | SI-PDF2 | Setaria italica PDF2 (PROTODERMAL FACTOR2) |
| | | promoter sequence |
| 68 | SI-PDF2 | Setaria italica PDF2 (PROTODERMAL FACTOR2) |
| | (TRUNCATED) | promoter sequence(TRUNCATED) |
| 69 | VV-PDF2a | Vitus vinifera PDF2a (PROTODERMAL FACTOR2a) |
| | | promoter sequence |
| 70 | PT-PDF2a | Populus trichocarpa PDF2a (PROTODERMAL |
| | | FACTOR2a) promoter sequence |
| 71 | PT-PDF2a | Populus trichocarpa PDF2a (PROTODERMAL |
| | (TRUNCATED) | FACTOR2a) promoter sequence (TRUNCATED) |
| 72 | MT-PDF2 | Medicago truncatula PDF2 (PROTODERMAL |
| | | FACTOR2) promoter sequence |
| 73 | MT-PDF2 | Medicago truncatula PDF2 (PROTODERMAL |
| | (TRUNCATED) | FACTOR2) promoter sequence (TRUNCATED) |
| 74 | AT-HDG2 | Arabidopsis thaliana HDG2 (HOMEODOMAIN |
| | | GLABROUS2) promoter sequence |
| 75 | GM-HDG2 | Glycine max HDG2 (HOMEODOMAIN |
| | | GLABROUS2) promoter sequence |
| 76 | GM-HDG2 | Glycine max HDG2 (HOMEODOMAIN |
| | (TRUNCATED) | GLABROUS2) promoter sequence (TRUNCATED) |
| 77 | SB-HDG2 | Sorghum bicolor HDG2 (HOMEODOMAIN |
| | | GLABROUS2) promoter sequence |
| 78 | SB-HDG2 | Sorghum bicolor HDG2 (HOMEODOMAIN |
| | (TRUNCATED) | GLABROUS2) promoter sequence (TRUNCATED) |
| 79 | AT-CER6 | Arabidopsis thaliana CER6 (ECERIFERUM6) |
| | | promoter sequence |
| 80 | AT-CER60 | Arabidopsis thaliana CER60 (ECERIFERUM60) |
| | | promoter sequence |
| 81 | AT-CER60 | Arabidopsis thaliana CER60 (ECERIFERUM60) |
| | (TRUNCATED) | promoter sequence (TRUNCATED) |
| 82 | GM-CER6 | Glycine max CER6 (ECERIFERUM6) promoter |
| | | sequence |
| 83 | GM-CER6 | Glycine max CER6 (ECERIFERUM6) promoter |
| | (TRUNCATED) | sequence (TRUNCATED) |
| 84 | PT-CER6 | Populus trichocarpa CER6 (ECERIFERUM6) |
| | | promoter sequence |
| 85 | PT-CER6 | Populus trichocarpa CER6 (ECERIFERUM6) |
| | (TRUNCATED) | promoter sequence (TRUNCATED) |
| 86 | VV-CER6 | Vitus vinifera CER6 (ECERIFERUM6) promoter |
| | | sequence |
| 87 | VV-CER6 | Vitus vinifera CER6 (ECERIFERUM6) promoter |
| | (TRUNCATED) | sequence (TRUNCATED) |
| 88 | SB-CER6 | Sorghum bicolor CER6 (ECERIFERUM6) promoter |
| | | sequence |
| 89 | ZM-CER6 | Zea mays CER6 (ECERIFERUM6) promoter sequence |
| 90 | SI-CER6 | Setaria italica CER6 (ECERIFERUM6) promoter |
| | | sequence |
| 91 | SI-CER6 | Setaria italica CER6 (ECERIFERUM6) promoter |
| | (TRUNCATED) | sequence (TRUNCATED) |
| 92 | OS-CER6 | Oryza sativa CER6 (ECERIFERUM6) promoter |
| | | sequence |
| 93 | OS-CER6 | Oryza sativa CER6 (ECERIFERUM6) promoter |
| | (TRUNCATED) | sequence (TRUNCATED) |
| 94 | GM-HBSTART2 | Glycine max HBSTART2 (Homeodomain StAR- |
| | | related lipid transfer2) promoter sequence |
| 95 | GM-MATE1 | Glycine max MATE1 (Multi-antimicrobial extrusion |
| | | protein1) promoter sequence |
| 96 | GM-NED1 | Glycine max NED1 (NAD dependent |
| | | epimerase/dehydratase1) promoter sequence |
| 97 | GM-LTP3 | Glycine max LTP3 (Lipid Transfer Protein3) promoter |
| | | sequence |
| 98 | SB-GL1 | Sorghum bicolor GL1 (GLABROUS1) promoter |
| | | sequence |
| 99 | OS-GL1 | Oryza sativa GL1 (GLABROUS1) promoter sequence |
| 100 | AT-GL1 | Arabidopsis thaliana GL1 (GLABROUS1) promoter |
| | | sequence |
| 101 | GM-GL1 | Glycine max GL1 (GLABROUS1) promoter sequence |
| 102 | AT-ANL1 | Arabidopsis thaliana ANL1 (ANTHOCYANLESS1) |
| | | promoter sequence |
| 103 | ZM-OCL1 | Zea mays OCL1 (OUTER CELL LAYER1) promoter |
| | | sequence |
| 104 | OS-OCL1 | Oryza sativa OCL1 (OUTER CELL LAYER1) |
| | | promoter sequence |
| 105 | HV-LTP2 | Hordeum vulgare LTP2 (LIPID-TRANSFER |
| | | PROTEIN) promoter sequence |
| 106 | SI-LTP2 | Setaria italic LTP2 (LIPID-TRANSFER PROTEIN) |
| | | promoter sequence |

[0152] As used herein, the term “regulatory element” also refers to a sequence of DNA, usually, but not always, upstream (5′) to the coding sequence of a structural gene, which includes sequences which control the expression of the coding region by providing the recognition for RNA polymerase and/or other factors required for transcription to start at a particular site. An example of a regulatory element that provides for the recognition for RNA polymerase or other transcriptional factors to ensure initiation at a particular site is a promoter element. A promoter element comprises a core promoter element, responsible for the initiation of transcription, as well as other regulatory elements that modify gene expression. It is to be understood that nucleotide sequences, located within introns or 3′ of the coding region sequence may also contribute to the regulation of expression of a coding region of interest. Examples of suitable introns include, but are not limited to, the maize IVS6 intron, or the maize actin intron. A regulatory element may also include those elements located downstream (3′) to the site of transcription initiation, or within transcribed regions, or both. In the context of the methods of the present disclosure a post-transcriptional regulatory element may include elements that are active following transcription initiation, for example translational and transcriptional enhancers, translational and transcriptional repressors and mRNA stability determinants.

[0153] A “heterologous nucleotide sequence”, “heterologous polynucleotide of interest”, “heterologous polynucleotide”, or “heterologous trait gene” as used throughout the present disclosure, is a sequence that is not naturally occurring with or operably linked to a promoter. While this nucleotide sequence or trait gene is heterologous to the promoter sequence, it may be homologous or native or heterologous or foreign to the plant host. Likewise, the promoter sequence may be homologous or native or heterologous or foreign to the plant host and/or the polynucleotide of interest.

[0154] Expression modulating elements are useful in the methods of the present disclosure. “Expression modulating/modulation element” or “EME” as used herein refers to a nucleotide sequence that up or down-regulates the expression of one or more plant genes. An EME may have one or more copies of the same sequence arranged head-to-head, tail-to-head, or head-to-tail or a combination thereof of configurations. EMEs are derived from plant sequences, or from bacterial or viral enhancer elements. Expression modulating elements increase or decrease expression of operably linked nucleotide sequences.

[0155] Methods for construction of chimeric and variant EMEs useful in the methods of the present disclosure include, but are not limited to, combining EME elements of different EMEs or duplicating portions or regions of one or more EMEs. Those of skill in the art are familiar with the standard resource materials that describe specific conditions and procedures for the construction, manipulation, and isolation of macromolecules (e.g., polynucleotide molecules and plasmids), as well as the generation of recombinant organisms and the screening and isolation of polynucleotide molecules.

[0156] Recombinant DNA constructs can be constructed by operably linking the nucleic acid fragment of the EMEs disclosed herein or a fragment that is substantially similar and functionally equivalent to any portion of the nucleotide sequence set forth in SEQ ID NOS: 107-174 to a heterologous nucleic acid fragment. Any heterologous nucleic acid fragment can be used. The selection of heterologous nucleic acid fragment will depend upon the desired application or phenotype to be achieved. The various nucleic acid sequences can be manipulated so as to provide for the nucleic acid sequences in the proper orientation.

[0157] EMEs useful in the methods of the present disclosure include, but are not limited to, those listed in Table 6.

TABLE 6

| SEQ ID | | | |
|---|---|---|---|
| NO: | Name | Size (bp) | SEQUENCE 5′-3′ |
| 107 | EME 1 | 17 | TGACGTAAGGTATGACG |
| 108 | EME 2 | 14 | CGTAAGGTATGACG |
| 109 | EME 3 | 22 | AACAACGTAAGCGCTTACGCAC |
| 110 | EME 4 | 16 | ACGTAAGCGCTTACGC |
| 111 | EME 5 | 14 | CGTAAGCGCTTACG |
| 112 | EME 6 | 14 | CGTAAACAAATACG |
| 113 | EME 7 | 14 | CGTAAACGCTTACG |
| 114 | EME 8 | 17 | TGACGTATGGTATGACG |
| 115 | EME 9 | 14 | CGTAAGGTCTTACG |
| 116 | EME 10 | 14 | CGTAAGTCCTTACG |
| 117 | EME 11 | 14 | CGTAAGTGCTTACG |
| 118 | EME 12 | 14 | CGTAAGGCCTTACG |
| 119 | EME 13 | 14 | CGTAAGACCTTACG |
| 120 | EME 14 | 14 | CGTAAGGACTTACG |
| 121 | EME 15 | 14 | CGTAAGCACTTACG |
| 122 | EME 16 | 14 | CGTAAGGGCTTACG |
| 123 | EME 17 | 14 | CGTAAGCCCTTACG |
| 124 | EME 18 | 14 | CGTAAGTACTTACG |
| 125 | EME 19 | 14 | CGTAAGATCTTACG |
| 126 | EME 20 | 16 | GCGTAAGCGCTTACGC |
| 127 | EME 21 | 16 | AAGTAAGCGCTTACTT |
| 128 | EME 22 | 16 | ACTTAAGCGCTTAAGT |
| 129 | EME 23 | 16 | ACGGAAGCGCTTCCGT |
| 130 | EME 24 | 16 | ACGTGAGCGCTCACGT |
| 131 | EME 25 | 16 | ACGTAGGCGCCTACGT |
| 132 | EME 26 | 16 | ACGTAATCGATTACGT |
| 133 | EME 27 | 16 | GATCGGTATACCGATC |
| 134 | EME 28 | 8 | GCTTACGT |
| 135 | EME 29 | 8 | ACGTAAGC |
| 136 | EME 30 | 16 | ACGTAAGCGCTTACGT |
| 137 | EME 31 | 20 | ACAACGTAAGCGCTTACGCA |
| 138 | EME 32 | 18 | CAACGTAAGCGCTTACGC |
| 139 | EME 33 | 15 | ACGTAAGCGCTTACG |
| 140 | EME 34 | 15 | CGTAAGCGCTTACGC |
| 141 | EME 35 | 13 | CGTAAGCGCTTAC |
| 142 | EME 36 | 13 | GTAAGCGCTTACG |
| 143 | EME 37 | 10 | TAAGCGCTTA |
| 144 | EME 38 | 8 | AAGCGCTT |
| 145 | EME 39 | 21 | CTGACGTAAGGGATGACGCAC |
| 146 | EME 40 | 16 | GACGTAAGGTATGACG |
| 147 | EME 41 | 15 | ACGTAAGGTATGACG |
| 148 | EME 42 | 13 | GTAAGGTATGACG |
| 149 | EME 43 | 12 | TAAGGTATGACG |
| 150 | EME 44 | 21 | CTGACGTAAGCGCTTACGTAC |
| 151 | EME 45 | 21 | CTGACGTAAGCGCTGACGTAC |
| 152 | EME 46 | 21 | CTGACGTAAGCGCTGACGCAC |
| 153 | EME 47 | 16 | ACGTAAGCGATTACGT |
| 154 | EME 48 | 21 | CTGACGTAAGCGATTACGCAC |
| 155 | EME 49 | 21 | CTGACGTAAGCGATTACGTAC |
| 156 | EME 50 | 21 | CTGACGTAAGGGATTACGTAC |
| 157 | EME 51 | 22 | AATGACGTAAGCGCTTACGCAC |
| 158 | EME 52 | 22 | AATGACGTAAGCGCTGACGCAC |
| 159 | EME 53 | 12 | CGTAAGGTATGA |
| 160 | EME 54 | 12 | GTAAGGTATGAC |
| 161 | EME 55 | 12 | GACGTAAGGTAT |
| 162 | EME 56 | 13 | ACGTAAGGTATGA |
| 163 | EME 57 | 13 | CGTAAGGTATGAC |
| 164 | EME 58 | 13 | GACGTAAGGTATG |
| 165 | EME 59 | 14 | ACGTAAGGTATGAC |
| 166 | EME 60 | 14 | GACGTAAGGTATGA |
| 167 | EME 61 | 15 | GACGTAAGGTATGAC |
| 168 | EME 62 | 11 | TAAGCGCTTAC |
| 169 | EME 63 | 12 | GTAAGCGCTTAC |
| 170 | EME 64 | 12 | TAAGCGCTTACG |
| 171 | EME 65 | 14 | GTAAGCGCTTACGC |
| 172 | EME 66 | 16 | AACGTAAGCGCTTACG |
| 173 | EME 67 | 16 | ACGTAAGCGCTTACGA |
| 174 | EME 68 | 16 | ACGTAAGCGCTTACGG |

[0158] The DNA constructs/expression cassettes useful in the methods of the present disclosure can also include further enhancers, either translation or transcription enhancers, as may be required. These enhancer regions are well known to persons skilled in the art and can include the ATG initiation codon and adjacent sequences. The initiation codon must be in phase with the reading frame of the coding sequence to ensure translation of the entire sequence. The translation control signals and initiation codons can be from a variety of origins, both natural and synthetic. Translational initiation regions may be provided from the source of the transcriptional initiation region, or from the structural gene. The sequence can also be derived from the regulatory element selected to express the gene and can be specifically modified to increase translation of the mRNA. It is recognized that to increase transcription levels enhancers may be utilized in combination with promoter regions. It is recognized that to increase transcription levels, enhancers may be utilized in combination with promoter regions. Enhancers are nucleotide sequences that act to increase the expression of a promoter region. Enhancers are known in the art and include the SV40 enhancer region, the 35S enhancer element and the like. Multiple enhancers or multiple copies of the same enhancer are useful in the methods of the present disclosure. Some enhancers are also known to alter normal promoter expression patterns, for example, by causing a promoter to be expressed constitutively when without the enhancer, the same promoter is expressed only in one specific tissue or a few specific tissues. Enhancers useful in the methods of the present disclosure are listed in Table 7 below.

TABLE 7

| SEQ ID | |
|---|---|
| NO: | Description |
| 175 | CaMV35S Enhancer (CAMV35S ENH) |
| 176 | Citrus Yellow Mosaic Virus Enhancer (CYMV ENH) |
| 177 | Banana Streak Virus Enhancer (BSV(AY) ENH) |
| 178 | Figwort Mosaic Virus Enhancer (FMV ENH) |
| 179 | Peanut Chlorotic Streak Virus Enhancer (PCSV ENH) |
| 180 | Mirabilis Mosaic Virus Enhancer (MMV ENH) |

[0159] Generally, a “weak promoter” means a promoter that drives expression of a coding sequence at a low level. A “low level” of expression is intended to mean expression at levels of about 1/10,000 transcripts to about 1/100,000 transcripts to about 1/500,000 transcripts. Conversely, a strong promoter drives expression of a coding sequence at a high level, or at about 1/10 transcripts to about 1/100 transcripts to about 1/1,000 transcripts.

[0160] It is recognized that sequences useful in the methods of the present disclosure may be used with their native coding sequences thereby resulting in a change in phenotype of the transformed plant. The morphogenic genes and genes of interest disclosed herein, as well as variants and fragments thereof, are useful in the methods of the present disclosure for the genetic manipulation of any plant. The term “operably linked” means that the transcription or translation of a heterologous nucleotide sequence is under the influence of a promoter sequence.

[0161] In one aspect of the present disclosure, expression cassettes comprise a transcriptional initiation region or variants or fragments thereof, operably linked to a morphogenic gene and/or a heterologous nucleotide sequence. Such expression cassettes can be provided with a plurality of restriction sites for insertion of the nucleotide sequence to be under the transcriptional regulation of the regulatory regions. The expression cassettes may additionally contain selectable marker genes as well as 3′ termination regions.

[0162] The expression cassettes can include, in the 5′-3′ direction of transcription, a transcriptional initiation region (i.e., a promoter, or variant or fragment thereof), a translational initiation region, a morphogenic gene and/or a heterologous nucleotide sequence of interest, a translational termination region and optionally, a transcriptional termination region functional in the host organism. The regulatory regions (i.e., promoters, transcriptional regulatory regions, and translational termination regions), the morphogenic gene and/or the polynucleotide of interest useful in the methods of the present disclosure may be native/analogous to the host cell or to each other. Alternatively, the regulatory regions, morphogenic gene and/or the polynucleotide of interest may be heterologous to the host cell or to each other. As used herein, “heterologous” in reference to a sequence is a sequence that originates from a foreign species or, if from the same species, is substantially modified from its native form in composition and/or genomic locus by deliberate human intervention. For example, a promoter operably linked to a heterologous polynucleotide is from a species different from the species from which the polynucleotide was derived or, if from the same/analogous species, one or both are substantially modified from their original form and/or genomic locus or the promoter is not the native promoter for the operably linked polynucleotide.

[0163] The termination region may be native with the transcriptional initiation region, may be native with the operably linked morphogenic gen and/or may be native with the operably linked DNA sequence of interest, may be native with the plant host, or may be derived from another source (i.e., foreign or heterologous to the promoter, the morphogenic gene and/or the DNA sequence being expressed, the plant host, or any combination thereof). Convenient termination regions are available from the Ti-plasmid of A. tumefaciens, such as the octopine synthase and nopaline synthase termination regions. See also, Guerineau, et al., (1991) Mol. Gen. Genet. 262:141-144; Proudfoot, (1991) Cell 64:671-674; Sanfacon, et al., (1991) Genes Dev. 5:141-149; Mogen, et al., (1990) Plant Cell 2:1261-1272; Munroe, et al., (1990) Gene 91:151-158; Ballas, et al., (1989) Nucleic Acids Res. 17:7891-7903; and Joshi, et al., (1987) Nucleic Acid Res. 15:9627-9639, herein incorporated by reference in their entirety.

[0164] The expression cassette comprising a promoter operably linked to a morphogenic gene and/or optionally further operably linked to a heterologous nucleotide sequence, a heterologous polynucleotide of interest, a heterologous polynucleotide nucleotide, a sequence of interest, or a trait gene can be used to transform any plant. Alternatively, a heterologous polynucleotide of interest, a heterologous polynucleotide nucleotide, a sequence of interest, or a trait gene operably linked to a promoter can be on a separate expression cassette positioned outside of the transfer-DNA (T-DNA). In this manner, genetically modified plants, plant cells, plant tissue, seed, root and the like can be obtained. The expression cassette comprising the sequences of the present disclosure may also contain at least one additional nucleotide sequence for a gene, heterologous nucleotide sequence, heterologous polynucleotide of interest, or heterologous polynucleotide to be cotransformed into the organism. Alternatively, the additional nucleotide sequence(s) can be provided on another expression cassette.

[0165] Where appropriate, the nucleotide sequences/trait genes whose expression is to be under the control a promoter sequence and any additional nucleotide sequence(s) may be optimized for increased expression in the transformed plant. That is, these nucleotide sequences can be synthesized using plant preferred codons for improved expression. See, for example, Campbell and Gowri, (1990) Plant Physiol. 92:1-11, herein incorporated by reference in its entirety, for a discussion of host-preferred codon usage. Methods are available in the art for synthesizing plant-preferred genes. See, for example, U.S. Pat. Nos. 5,380,831, 5,436,391 and Murray, et al., (1989) Nucleic Acids Res. 17:477-498, herein incorporated by reference in their entirety.

[0166] Additional sequence modifications are known to enhance gene expression in a cellular host. These include elimination of sequences encoding spurious polyadenylation signals, exon-intron splice site signals, transposon-like repeats and other such well-characterized sequences that may be deleterious to gene expression. The G-C content of a heterologous nucleotide sequence may be adjusted to levels average for a given cellular host, as calculated by reference to known genes expressed in the host cell. When possible, the sequence is modified to avoid predicted hairpin secondary mRNA structures.

[0167] As used herein, “vector” refers to a DNA molecule such as a plasmid, cosmid or bacterial phage for introducing a nucleotide construct, for example, an expression cassette, into a host cell. Cloning vectors typically contain one or a small number of restriction endonuclease recognition sites at which foreign DNA sequences can be inserted in a determinable fashion without loss of essential biological function of the vector, as well as a marker gene that is suitable for use in the identification and selection of cells transformed with the cloning vector. Marker genes typically include genes that provide tetracycline resistance, hygromycin resistance or ampicillin resistance.

[0168] In an aspect, haploid cells can be contacted with an amount of a chromosome doubling agent to promote chromosome doubling followed by regenerating homozygous diploid plants from the treated haploid cells. The haploid microspore cells can be in contact with the doubling agent before, during, or after initiation of microspore embryogenesis or embryo maturation. After chromosome doubling, the doubled haploid embryo will contain 2 copies of paternally derived chromosomes. The efficiency of the process for obtaining doubled haploid plants from haploid embryos may be greater than 10%, 20%, 30%, 50%, 60%, 70%, 80%, or 90%. The duration of contact between the haploid cells and the chromosomal doubling agent may vary. Contact may be from less than 24 hours, for example 4-12 hours, to about a week. The duration of contact is generally from about 8 hours to 2 days.

[0169] Methods of chromosome doubling are disclosed in Antoine-Michard, S. et al., Plant cell, tissue organ cult., Cordrecht, the Netherlands, Kluwer Academic Publishers, 1997, 48(3):203-207; Kato, A., Maize Genetics Cooperation Newsletter 1997, 36-37; and Wan, Y. et al., TAG, 1989, 77: 889-892. Wan, Y. et al., TAG, 1991, 81: 205-211. The disclosures of which are incorporated herein by reference. Typical doubling methods involve contacting the cells with colchicine, anti-microtubule agents or anti-microtubule herbicides, pronamide, nitrous oxide, or any mitotic inhibitor to create homozygous doubled haploid cells. The amount of cochicine used in medium is generally 0.01%-0.2% or approximately 0.05% of amiprophos-methyl (APM) (5-225 M) may be used. The amount of colchicine can range from approximately 400-600 mg/L or approximately 500 mg/L. The amount of pronamide in medium is approximately 0.5-20 μM. Examples of mitotic inhibitors are included in Table 8. Other agents may be used with the mitotic inhibitors to improve doubling efficiency. Such agents include dimethyl sulfoxide (DMSO), adjuvants, surfactants, and the like.

TABLE 8

| | | |
|---|---|---|
| Common Name/ | | |
| Trade name | CAS | IUPAC |

Colchicine and Colchicine Derivatives

| | |
|---|---|
| colchicine/ | (S)-N-(5,6,7,9-tetrahydro-1,2,3,10- |
| acetyltrimethylcol- | tetramethoxy-9-oxobenzo (a) |
| chicinic acid | heptalen-7-yl) acetamide |
| colchicine derivatives | |

Carbamates

| | | |
|---|---|---|
| Carbetamide | (R)-1-(ethylcarbamoyl)ethyl | (2R)-N-ethyl-2- |
| | carbanilate | [[(phenylamino)carbonyl]oxy] |
| | | propanamide |
| chloropropham | | |
| Propham | | |

Benzamides

| | | |
|---|---|---|
| Pronamide/ | 3,5-dichloro-N-(1,1- | 3,5-dichloro-N-(1,1-dimethyl-2- |
| propyzamide | dimethylpropynyl)benzamide | propynyl)benzamide |
| Tebutam | | |

Benzoic Acids

| | | |
|---|---|---|
| Chlorthal dimethyl | | |
| (DCPA), | | |
| Dicamba/dianat/ | 3,6-dichloro-o-anisic acid | 3,6-dichloro-2-methoxybenzoic acid |
| disugran (dicamba- | | |
| methyl) (BANVEL, | | |
| CLARITY) | | |

Dinitroaniline chromosome doubling agents

| | | |
|---|---|---|
| benfluralin/benefin/ | N-butyl-N-ethyl-α,α,α- | N-butyl-N-ethyl-2,6-dinitro-4- |
| (BALAN) | trifluoro-2,6-dinitro-p- | (trifluoromethyl)benzenamine |
| | toluidine | |
| Butralin | (RS)-N-sec-butyl-4-tert- | 4-(1,1-dimethylethyl)-N-(1- |
| | butyl-2,6-dinitroaniline | methylpropyl)-2,6- |
| | | dinitrobenzenamine |
| Chloralin | | |
| dinitramine | N1,N1-diethyl-2,6-dinitro-4- | N3,N3-diethyl-2,4-dinitro-6- |
| | trifluoromethyl-m- | (trifluoromethyl)-1,3- |
| | phenylenediamine | benzenediamine |
| ethalfluralin | N-ethyl-α,α,α-trifluoro-N-(2- | N-ethyl-N-(2-methyl-2-propenyl)- |
| (Sonalan) | methylallyl)-2,6-dinitro-p- | 2,6-dinitro-4- |
| | toluidine | (trifluoromethyl)benzenamine |
| fluchloralin | N-(2-chloroethyl)-2,6- | N-(2-chloroethyl)-2,6-dinitro-N- |
| | dinitro-N-propyl-4- | propyl-4- |
| | (trifluoromethyl)aniline or | (trifluoromethyl)benzenamine |
| | N-(2-chloroethyl)-α,α,α- | |
| | trifluoro-2,6-dinitro-N- | |
| | propyl-p-toluidine | |
| isopropalin | 4-isopropyl-2,6-dinitro-N,N- | 4-(1-methylethyl)-2,6-dinitro-N,N- |
| | dipropylaniline | dipropylbenzenamine |
| methalpropalin | α,α,α-trifluoro-N-(2- | N-(2-methyl-2-propenyl)-2,6- |
| | methylallyl)-2,6-dinitro-N- | dinitro-N-propyl-4- |
| | propyl-p-toluidine | (trifluoromethyl)benzenamine |
| nitralin | 4-methylsulfonyl-2,6-dinitro- | 4-(methylsulfonyl)-2,6-dinitro-N,N- |
| | N,N-dipropylaniline | dipropylbenzenamine |
| oryzalin | 3,5-dinitro-N4,N4- | 4-(dipropylamino)-3,5- |
| (SURFLAN) | dipropylsulfanilamide | dinitrobenzenesulfonamide |
| pendimethalin | N-(1-ethylpropyl)-2,6- | N-(1-ethylpropyl)-3,4-dimethyl-2,6- |
| (PROWL) | dinitro-3,4-xylidine | dinitrobenzenamine |
| prodiamine | 5-dipropylamino-α,α,α- | 2,4-dinitro-N3,N3-dipropyl-6- |
| | trifluoro-4,6-dinitro-o-toluidine | (trifluoromethyl)-1,3- |
| | or 2,6-dinitro-N1,N1-dipropyl- | benzenediamine |
| | 4-trifluoromethyl-m- | |
| | phenylenediamine | |
| profluralin | N-cyclopropylmethyl-α,α,α- | N-(cyclopropylmethyl)-2,6-dinitro- |
| | trifluoro-2,6-dinitro-N- | N-propyl-4- |
| | propyl-p-toluidine or | (trifluoromethyl)benzenamine |
| | N-cyclopropylmethyl-2,6- | |
| | dinitro-N-propyl-4- | |
| | trifluoromethyl aniline | |
| trifluralin (TREFLAN, | α,α,α-trifluoro-2,6-dinitro- | 2,6-dinitro-N,N-dipropyl-4- |
| TRIFIC, TRILLIN ) | N,N-dipropyl-p-toluidine | (trifluoromethyl)benzenamine |

Phosphoroamidates

| | | |
|---|---|---|
| APM (Amiprofos | | |
| methyl); amiprophos- | | |
| methyl | | |
| Butamifos | O-ethyl O-6-nitro-m-tolyl | O-ethyl O-(5-methyl-2-nitrophenyl) |
| | (RS)-sec- | (1-methylpropyl)phosphoramidothioate |
| | butylphosphoramidothioate | |

Pyridines

| | | |
|---|---|---|
| Dithiopyr | | |
| Thiazopyr | methyl 2-difluoromethyl-5- | methyl 2-(difluoromethyl)-5-(4,5- |
| | (4,5-dihydro-1,3-thiazol-2- | dihydro-2-thiazolyl)-4-(2- |
| | yl)-4-isobutyl-6- | methylpropyl)-6-(trifluoromethyl)-3- |
| | trifluoromethylnicotinate | pyridinecarboxylate |

[0170] Cells that have been transformed may be grown into plants in accordance with conventional ways. See, for example, McCormick, et al., (1986) Plant Cell Reports 5:81-84, herein incorporated by reference in its entirety. These plants may then be grown, and either pollinated with the same transformed strain or different strains, and the resulting progeny having expression of the desired phenotypic characteristic identified. Two or more generations may be grown to ensure that expression of the desired phenotypic characteristic is stably maintained and inherited and then seeds harvested to ensure expression of the desired phenotypic characteristic has been achieved. In this manner, the present disclosure provides transformed seed (also referred to as “transgenic seed”) having a nucleotide construct useful in the methods of the present disclosure, for example, an expression cassette useful in the methods of the present disclosure, stably incorporated into its genome.

[0171] There are a variety of methods for the regeneration of plants from plant tissue. The particular method of regeneration will depend on the starting plant tissue and the particular plant species to be regenerated. The regeneration, development and cultivation of plants from single plant protoplast transformants or from various transformed explants is well known in the art (Weissbach and Weissbach, (1988) In: Methods for Plant Molecular Biology, (Eds.), Academic Press, Inc., San Diego, Calif., herein incorporated by reference in its entirety). This regeneration and growth process typically includes the steps of selection of transformed cells, culturing those individualized cells through the usual stages of embryonic development through the rooted plantlet stage. Transgenic embryos and seeds are similarly regenerated. The resulting transgenic rooted shoots are thereafter planted in an appropriate plant growth medium such as soil. Preferably, the regenerated plants are self-pollinated to provide homozygous transgenic plants. Otherwise, pollen obtained from the regenerated plants is crossed to seed-grown plants of agronomically important lines. Conversely, pollen from plants of these important lines is used to pollinate regenerated plants. A transgenic plant produced by the methods of the present disclosure containing a desired polynucleotide of interest is cultivated using methods well known to one skilled in the art.

[0172] Methods are known in the art for the targeted insertion of a polynucleotide at a specific location in the plant genome. The insertion of the polynucleotide at a desired genomic location is achieved using a site-specific recombination system. See, for example, WO99/25821, WO99/25854, WO99/25840, WO99/25855 and WO99/25853, all of which are herein incorporated by reference in their entirety. Briefly, a polynucleotide of interest, flanked by two non-identical recombination sites, can be contained in a T-DNA transfer cassette. The T-DNA transfer cassette is introduced into a plant having stably incorporated into its genome a target site which is flanked by two non-identical recombination sites that correspond to the sites of the transfer cassette. An appropriate recombinase is provided, and the transfer cassette is integrated at the target site. The polynucleotide of interest is thereby integrated at a specific chromosomal position in the plant genome.

[0173] The disclosed methods can be used to introduce into explants polynucleotides that are useful to target a specific site for modification in the genome of a plant derived from the explant. Site specific modifications that can be introduced with the disclosed methods include those produced using any method for introducing site specific modification, including, but not limited to, through the use of gene repair oligonucleotides (e.g. US Publication 2013/0019349), or through the use of double-stranded break technologies such as TALENs, meganucleases, zinc finger nucleases, CRISPR-Cas, and the like. For example, the disclosed methods can be used to introduce a CRISPR-Cas system into a plant cell or plant, for the purpose of genome modification of a target sequence in the genome of a plant or plant cell, for selecting plants, for deleting a base or a sequence, for gene editing, and for inserting a polynucleotide of interest into the genome of a plant or plant cell. Thus, the disclosed methods can be used together with a CRISPR-Cas system to provide for an effective system for modifying or altering target sites and nucleotides of interest within the genome of a plant, plant cell or seed. The Cas endonuclease gene is a plant optimized Cas9 endonuclease, wherein the plant optimized Cas9 endonuclease is capable of binding to and creating a double strand break in a genomic target sequence of the plant genome.

[0174] The Cas endonuclease is guided by the guide nucleotide to recognize and optionally introduce a double strand break at a specific target site into the genome of a cell. The CRISPR-Cas system provides for an effective system for modifying target sites within the genome of a plant, plant cell or seed. Further provided are methods employing a guide polynucleotide/Cas endonuclease system to provide an effective system for modifying target sites within the genome of a cell and for editing a nucleotide sequence in the genome of a cell. Once a genomic target site is identified, a variety of methods can be employed to further modify the target sites such that they contain a variety of polynucleotides of interest. The disclosed methods can be used to introduce a CRISPR-Cas system for editing a nucleotide sequence in the genome of a cell. The nucleotide sequence to be edited (the nucleotide sequence of interest) can be located within or outside a target site that is recognized by a Cas endonuclease.

[0175] CRISPR loci (Clustered Regularly Interspaced Short Palindromic Repeats) (also known as SPIDRs-SPacer Interspersed Direct Repeats) constitute a family of recently described DNA loci. CRISPR loci consist of short and highly conserved DNA repeats (typically 24 to 40 bp, repeated from 1 to 140 times—also referred to as CRISPR-repeats) which are partially palindromic. The repeated sequences (usually specific to a species) are interspaced by variable sequences of constant length (typically 20 to 58 by depending on the CRISPR locus (WO2007/025097 published Mar. 1, 2007).

[0176] Cas gene includes a gene that is generally coupled, associated or close to or in the vicinity of flanking CRISPR loci. The terms “Cas gene” and “CRISPR-associated (Cas) gene” are used interchangeably herein.

[0177] In another aspect, the Cas endonuclease gene is operably linked to a SV40 nuclear targeting signal upstream of the Cas codon region and a bipartite VirD2 nuclear localization signal (Tinland et al. (1992) Proc. Natl. Acad. Sci. USA 89:7442-6) downstream of the Cas codon region.

[0178] As related to the Cas endonuclease, the terms “functional fragment,” “fragment that is functionally equivalent,” and “functionally equivalent fragment” are used interchangeably herein. These terms refer to a portion or subsequence of the Cas endonuclease sequence in which the ability to create a double-strand break is retained.

[0179] As related to the Cas endonuclease, the terms “functional variant,” “variant that is functionally equivalent” and “functionally equivalent variant” are used interchangeably herein. These terms refer to a variant of the Cas endonuclease in which the ability to create a double-strand break is retained. Fragments and variants can be obtained via methods such as site-directed mutagenesis and synthetic construction.

[0180] In an aspect, the Cas endonuclease gene is a plant codon optimized Streptococcus pyogenes Cas9 gene that can recognize any genomic sequence of the form N(12-30)NGG which can in principle be targeted.

[0181] Endonucleases are enzymes that cleave the phosphodiester bond within a polynucleotide chain and include restriction endonucleases that cleave DNA at specific sites without damaging the bases. Restriction endonucleases include Type I, Type II, Type III, and Type IV endonucleases, which further include subtypes. In the Type I and Type III systems, both the methylase and restriction activities are contained in a single complex. Endonucleases also include meganucleases, also known as homing endonucleases (HEases), which like restriction endonucleases, bind and cut at a specific recognition site, however the recognition sites for meganucleases are typically longer, about 18 bp or more (Patent application PCT/US 12/30061 filed on Mar. 22, 2012). Meganucleases have been classified into four families based on conserved sequence motifs. These motifs participate in the coordination of metal ions and hydrolysis of phosphodiester bonds. Meganucleases are notable for their long recognition sites, and for tolerating some sequence polymorphisms in their DNA substrates. The naming convention for meganuclease is similar to the convention for other restriction endonuclease. Meganucleases are also characterized by prefix F-, I-, or PI- for enzymes encoded by free-standing ORFs, introns, and inteins, respectively. One step in the recombination process involves polynucleotide cleavage at or near the recognition site. This cleaving activity can be used to produce a double-strand break. For reviews of site-specific recombinases and their recognition sites, see, Sauer (1994) Curr Op Biotechnol 5:521-7; and Sadowski (1993) FASEB 7:760-7. In some examples the recombinase is from the Integrase or Resolvase families. TAL effector nucleases are a new class of sequence-specific nucleases that can be used to make double-strand breaks at specific target sequences in the genome of a plant or other organism. (Miller, et al. (2011) Nature Biotechnology 29:143-148). Zinc finger nucleases (ZFNs) are engineered double-strand break inducing agents comprised of a zinc finger DNA binding domain and a double-strand-break-inducing agent domain. Recognition site specificity is conferred by the zinc finger domain, which typically comprising two, three, or four zinc fingers, for example having a C2H2 structure, however other zinc finger structures are known and have been engineered. Zinc finger domains are amenable for designing polypeptides which specifically bind a selected polynucleotide recognition sequence. ZFNs include an engineered DNA-binding zinc finger domain linked to a nonspecific endonuclease domain, for example nuclease domain from a Type Ms endonuclease such as Fok1. Additional functionalities can be fused to the zinc-finger binding domain, including transcriptional activator domains, transcription repressor domains, and methylases. In some examples, dimerization of nuclease domain is required for cleavage activity. Each zinc finger recognizes three consecutive base pairs in the target DNA. For example, a 3-finger domain recognized a sequence of 9 contiguous nucleotides, with a dimerization requirement of the nuclease, two sets of zinc finger triplets are used to bind an 18-nucleotide recognition sequence.

[0182] A “Dead-CAS9” (dCAS9) as used herein, is used to supply a transcriptional repressor domain. The dCAS9 has been mutated so that can no longer cut DNA. The dCAS0 can still bind when guided to a sequence by the gRNA and can also be fused to repressor elements. The dCAS9 fused to the repressor element, as described herein, is abbreviated to dCAS9-REP, where the repressor element (REP) can be any of the known repressor motifs that have been characterized in plants. An expressed guide RNA (gRNA) binds to the dCAS9-REP protein and targets the binding of the dCAS9-REP fusion protein to a specific predetermined nucleotide sequence within a promoter (a promoter within the T-DNA). For example, if this is expressed beyond-the border using a ZM-UBI PRO::dCAS9-REP::PINII TERM cassette along with a U6-POL PRO::gRNA::U6 TERM cassette and the gRNA is designed to guide the dCAS9-REP protein to bind the SB-UBI promoter in the expression cassette SB-UBI PRO::moPAT::PINII TERM within the T-DNA, any event that has integrated the beyond-the-border sequence would be bialaphos sensitive. Transgenic events that integrate only the T-DNA would express moPAT and be bialaphos resistant. The advantage of using a dCAS9 protein fused to a repressor (as opposed to a TETR or ESR) is the ability to target these repressors to any promoter within the T-DNA. TETR and ESR are restricted to cognate operator binding sequences. Alternatively, a synthetic Zinc-Finger Nuclease fused to a repressor domain can be used in place of the gRNA and dCAS9-REP (Urritia et al., 2003, Genome Biol. 4:231) as described above.

[0183] The type II CRISPR/Cas system from bacteria employs a crRNA and tracrRNA to guide the Cas endonuclease to its DNA target. The crRNA (CRISPR RNA) contains the region complementary to one strand of the double strand DNA target and base pairs with the tracrRNA (trans-activating CRISPR RNA) forming a RNA duplex that directs the Cas endonuclease to cleave the DNA target. As used herein, the term “guide nucleotide” relates to a synthetic fusion of two RNA molecules, a crRNA (CRISPR RNA) comprising a variable targeting domain, and a tracrRNA. In an aspect, the guide nucleotide comprises a variable targeting domain of 12 to 30 nucleotide sequences and a RNA fragment that can interact with a Cas endonuclease.

[0184] As used herein, the term “guide polynucleotide” relates to a polynucleotide sequence that can form a complex with a Cas endonuclease and enables the Cas endonuclease to recognize and optionally cleave a DNA target site. The guide polynucleotide can be a single molecule or a double molecule. The guide polynucleotide sequence can be a RNA sequence, a DNA sequence, or a combination thereof (a RNA-DNA combination sequence). Optionally, the guide polynucleotide can comprise at least one nucleotide, phosphodiester bond or linkage modification such as, but not limited, to Locked Nucleic Acid (LNA), 5-methyl dC, 2,6-Diaminopurine, 2′-Fluoro A, 2′-Fluoro U, 2′-O-Methyl RNA, phosphorothioate bond, linkage to a cholesterol molecule, linkage to a polyethylene glycol molecule, linkage to a spacer 18 (hexaethylene glycol chain) molecule, or 5′ to 3′ covalent linkage resulting in circularization. A guide polynucleotide that solely comprises ribonucleic acids is also referred to as a “guide nucleotide”.

[0185] Nucleotide sequence modification of the guide polynucleotide, VT domain and/or CER domain can be selected from, but not limited to, the group consisting of a 5′ cap, a 3′ polyadenylated tail, a riboswitch sequence, a stability control sequence, a sequence that forms a dsRNA duplex, a modification or sequence that targets the guide poly nucleotide to a subcellular location, a modification or sequence that provides for tracking, a modification or sequence that provides a binding site for proteins, a Locked Nucleic Acid (LNA), a 5-methyl dC nucleotide, a 2,6-Diaminopurine nucleotide, a 2′-Fluoro A nucleotide, a 2′-Fluoro U nucleotide; a 2′-O-Methyl RNA nucleotide, a phosphorothioate bond, linkage to a cholesterol molecule, linkage to a polyethylene glycol molecule, linkage to a spacer 18 molecule, a 5′ to 3′ covalent linkage, or any combination thereof. These modifications can result in at least one additional beneficial feature, wherein the additional beneficial feature is selected from the group of a modified or regulated stability, a subcellular targeting, tracking, a fluorescent label, a binding site for a protein or protein complex, modified binding affinity to complementary target sequence, modified resistance to cellular degradation, and increased cellular permeability.

[0186] In an aspect, the guide nucleotide and Cas endonuclease are capable of forming a complex that enables the Cas endonuclease to introduce a double strand break at a DNA target site.

[0187] In an aspect of the present disclosure the variable target domain is 12, 13, 14, 15, 16, 17, 18, 19, 20, 21, 22, 23, 24, 25, 26, 27, 28, 29 or 30 nucleotides in length.

[0188] In an aspect of the present disclosure, the guide nucleotide comprises a cRNA (or cRNA fragment) and a tracrRNA (or tracrRNA fragment) of the type II CRISPR/Cas system that can form a complex with a type II Cas endonuclease, wherein the guide nucleotide Cas endonuclease complex can direct the Cas endonuclease to a plant genomic target site, enabling the Cas endonuclease to introduce a double strand break into the genomic target site. The guide nucleotide can be introduced into a plant or plant cell directly using any method known in the art such as, but not limited to, particle bombardment or topical applications.

[0189] In an aspect, the guide nucleotide can be introduced indirectly by introducing a recombinant DNA molecule comprising the corresponding guide DNA sequence operably linked to a plant specific promoter that is capable of transcribing the guide nucleotide in the plant cell. The term “corresponding guide DNA” includes a DNA molecule that is identical to the RNA molecule but has a “T” substituted for each “U” of the RNA molecule.

[0190] In an aspect, the guide nucleotide is introduced via particle bombardment or using the disclosed methods for Agrobacterium transformation of a recombinant DNA construct comprising the corresponding guide DNA operably linked to a plant U6 polymerase III promoter.

[0191] In an aspect, the RNA that guides the RNA Cas9 endonuclease complex, is a duplexed RNA comprising a duplex crRNA-tracrRNA. One advantage of using a guide nucleotide versus a duplexed crRNA-tracrRNA is that only one expression cassette needs to be made to express the fused guide nucleotide.

[0192] The terms “target site,” “target sequence,” “target DNA,” “target locus,” “genomic target site,” “genomic target sequence,” and “genomic target locus” are used interchangeably herein and refer to a polynucleotide sequence in the genome (including choloroplastic and mitochondrial DNA) of a plant cell at which a double-strand break is induced in the plant cell genome by a Cas endonuclease. The target site can be an endogenous site in the plant genome, or alternatively, the target site can be heterologous to the plant and thereby not be naturally occurring in the genome, or the target site can be found in a heterologous genomic location compared to where it occurs in nature.

[0193] As used herein, terms “endogenous target sequence” and “native target sequence” are used interchangeably herein to refer to a target sequence that is endogenous or native to the genome of a plant and is at the endogenous or native position of that target sequence in the genome of the plant.

[0194] An “artificial target site” or “artificial target sequence” are used interchangeably herein and refer to a target sequence that has been introduced into the genome of a plant. Such an artificial target sequence can be identical in sequence to an endogenous or native target sequence in the genome of a plant but be located in a different position (i.e., a non-endogenous or non-native position) in the genome of a plant.

[0195] An “altered target site,” “altered target sequence” “modified target site,” and “modified target sequence” are used interchangeably herein and refer to a target sequence as disclosed herein that comprises at least one alteration when compared to non-altered target sequence. Such “alterations” include, for example: (i) replacement of at least one nucleotide, (ii) a deletion of at least one nucleotide, (iii) an insertion of at least one nucleotide, or (iv) any combination of (i)-(iii).

[0196] In an aspect, the disclosed methods can be used to introduce into plants polynucleotides useful for gene suppression of a target gene in a plant. Reduction of the activity of specific genes (also known as gene silencing, or gene suppression) is desirable for several aspects of genetic engineering in plants. Many techniques for gene silencing are well known to one of skill in the art, including but not limited to antisense technology.

[0197] In an aspect, the disclosed methods can be used to introduce into plants polynucleotides useful for the targeted integration of nucleotide sequences into a plant. For example, the disclosed methods can be used to introduce T-DNA expression cassettes comprising nucleotide sequences of interest flanked by non-identical recombination sites are used to transform a plant comprising a target site. In an aspect, the target site contains at least a set of non-identical recombination sites corresponding to those on the T-DNA expression cassette. The exchange of the nucleotide sequences flanked by the recombination sites is affected by a recombinase. Thus, the disclosed methods can be used for the introduction of T-DNA expression cassettes for targeted integration of nucleotide sequences, wherein the T-DNA expression cassettes which are flanked by non-identical recombination sites recognized by a recombinase that recognizes and implements recombination at the nonidentical recombination sites. Accordingly, the disclosed methods and composition can be used to improve efficiency and speed of development of plants containing non-identical recombination sites.

[0198] Thus, the disclosed methods can further comprise methods for the directional, targeted integration of exogenous nucleotides into a transformed plant. In an aspect, the disclosed methods use novel recombination sites in a gene targeting system which facilitates directional targeting of desired genes and nucleotide sequences into corresponding recombination sites previously introduced into the target plant genome.

[0199] In an aspect, a nucleotide sequence flanked by two non-identical recombination sites is introduced into one or more cells of an explant derived from the target organism's genome establishing a target site for insertion of nucleotide sequences of interest. Once a stable plant or cultured tissue is established a second construct, or nucleotide sequence of interest, flanked by corresponding recombination sites as those flanking the target site, is introduced into the stably transformed plant or tissues in the presence of a recombinase protein. This process results in exchange of the nucleotide sequences between the non-identical recombination sites of the target site and the T-DNA expression cassette.

[0200] It is recognized that the transformed plant prepared in this manner may comprise multiple target sites; i. e., sets of non-identical recombination sites. In this manner, multiple manipulations of the target site in the transformed plant are available. By target site in the transformed plant is intended a DNA sequence that has been inserted into the transformed plant's genome and comprises non-identical recombination sites.

[0201] Examples of recombination sites for use in the disclosed method are known. The two-micron plasmid found in most naturally occurring strains of Saccharomyces cerevisiae, encodes a site-specific recombinase that promotes an inversion of the DNA between two inverted repeats. This inversion plays a central role in plasmid copy-number amplification.

[0202] The protein, designated FLP protein, catalyzes site-specific recombination events. The minimal recombination site (FRT) has been defined and contains two inverted 13-base pair (bp) repeats surrounding an asymmetric 8-bp spacer. The FLP protein cleaves the site at the junctions of the repeats and the spacer and is covalently linked to the DNA via a 3′phosphate. Site specific recombinases like FLP cleave and religate DNA at specific target sequences, resulting in a precisely defined recombination between two identical sites. To function, the system needs the recombination sites and the recombinase. No auxiliary factors are needed. Thus, the entire system can be inserted into and function in plant cells. The yeast FLP\FRT site specific recombination system has been shown to function in plants. To date, the system has been utilized for excision of unwanted DNA. See, Lyznik et at. (1993) Nucleic Acid Res. 21: 969-975. In contrast, the present disclosure utilizes non-identical FRTs for the exchange, targeting, arrangement, insertion and control of expression of nucleotide sequences in the plant genome.

[0203] In an aspect, a transformed organism of interest, such as an explant from a plant, containing a target site integrated into its genome is needed. The target site is characterized by being flanked by non-identical recombination sites. A targeting cassette is additionally required containing a nucleotide sequence flanked by corresponding non-identical recombination sites as those sites contained in the target site of the transformed organism. A recombinase which recognizes the non-identical recombination sites and catalyzes site-specific recombination is required.

[0204] It is recognized that the recombinase can be provided by any means known in the art. That is, it can be provided in the organism or plant cell by transforming the organism with an expression cassette capable of expressing the recombinase in the organism, by transient expression, or by providing messenger RNA (mRNA) for the recombinase or the recombinase protein.

[0205] By “non-identical recombination sites” it is intended that the flanking recombination sites are not identical in sequence and will not recombine or recombination between the sites will be minimal. That is, one flanking recombination site may be a FRT site where the second recombination site may be a mutated FRT site. The non-identical recombination sites used in the methods of the present disclosure prevent or greatly suppress recombination between the two flanking recombination sites and excision of the nucleotide sequence contained therein. Accordingly, it is recognized that any suitable non-identical recombination sites may be utilized in the present disclosure, including FRT and mutant FRT sites, FRT and lox sites, lox and mutant lox sites, as well as other recombination sites known in the art.

[0206] By suitable non-identical recombination site implies that in the presence of active recombinase, excision of sequences between two non-identical recombination sites occurs, if at all, with an efficiency considerably lower than the recombinationally-mediated exchange targeting arrangement of nucleotide sequences into the plant genome. Thus, suitable non-identical sites for use in the present disclosure include those sites where the efficiency of recombination between the sites is low; for example, where the efficiency is less than about 30 to about 50%, preferably less than about 10 to about 30%, more preferably less than about 5 to about 10%.

[0207] As noted above, the recombination sites in the targeting cassette correspond to those in the target site of the transformed plant. That is, if the target site of the transformed plant contains flanking non-identical recombination sites of FRT and a mutant FRT, the targeting cassette will contain the same FRT and mutant FRT non-identical recombination sites.

[0208] It is furthermore recognized that the recombinase, which is used in the disclosed methods, will depend upon the recombination sites in the target site of the transformed plant and the targeting cassette. That is, if FRT sites are utilized, the FLP recombinase will be needed. In the same manner, where lox sites are utilized, the Cre recombinase is required. If the non-identical recombination sites comprise both a FRT and a lox site, both the FLP and Cre recombinase will be required in the plant cell.

[0209] The FLP recombinase is a protein which catalyzes a site-specific reaction that is involved in amplifying the copy number of the two-micron plasmid of S. cerevisiae during DNA replication. FLP protein has been cloned and expressed. See, for example, Cox (1993) Proc. Natl. Acad. Sci. U.S.A 80: 4223-4227. The FLP recombinase for use in the present disclosure may be that derived from the genus Saccharomyces. It may be preferable to synthesize the recombinase using plant preferred codons for optimum expression in a plant of interest. See, for example, U.S. application Ser. No. 08/972,258 filed Nov. 18, 1997, entitled “Novel Nucleic Acid Sequence Encoding FLP Recombinase,” herein incorporated by reference.

[0210] The bacteriophage recombinase Cre catalyzes site-specific recombination between two lox sites. The Cre recombinase is known in the art. See, for example, Guo et al. (1997) Nature 389: 40-46; Abremski et al. (1984) J. Biol. Chem. 259: 1509-1514; Chen et al. (1996) Somat. Cell Mol. Genet. 22: 477-488; and Shaikh et al. (1977) J. Biol. Chem. 272: 5695-5702. All of which are herein incorporated by reference. Such Cre sequence may also be synthesized using plant preferred codons.

[0211] Where appropriate, the nucleotide sequences to be inserted in the plant genome may be optimized for increased expression in the transformed plant. Where mammalian, yeast, or bacterial genes are used in the present disclosure, they can be synthesized using plant preferred codons for improved expression. It is recognized that for expression in monocots, dicot genes can also be synthesized using monocot preferred codons. Methods are available in the art for synthesizing plant preferred genes. See, for example, U.S. Pat. Nos. 5,380,831, 5,436,391, and Murray et al. (1989) Nucleic Acids Res. 17: 477-498, herein incorporated by reference. The plant preferred codons may be determined from the codons utilized more frequently in the proteins expressed in the plant of interest. It is recognized that monocot or dicot preferred sequences may be constructed as well as plant preferred sequences for particular plant species. See, for example, EPA 0359472; EPA 0385962; WO 91/16432; Perlak et al. (1991) Proc. Natl. Acad. Sci. USA, 88: 3324-3328; and Murray et al. (1989) Nucleic Acids Research, 17: 477-498. U.S. Pat. Nos. 5,380,831; 5,436,391; and the like, herein incorporated by reference. It is further recognized that all or any part of the gene sequence may be optimized or synthetic. That is, fully optimized or partially optimized sequences may also be used.

[0212] Additional sequence modifications are known to enhance gene expression in a cellular host and can be used in the present disclosure. These include elimination of sequences encoding spurious polyadenylation signals, exon-intron splice site signals, transposon-like repeats, and other such well-characterized sequences, which may be deleterious to gene expression. The G-C content of the sequence may be adjusted to levels average for a given cellular host, as calculated by reference to known genes expressed in the host cell. When possible, the sequence is modified to avoid predicted hairpin secondary RNA structures.

[0213] The present disclosure also encompasses novel FLP recombination target sites (FRT). The FRT has been identified as a minimal sequence comprising two 13 base pair repeats, separated by an eight (8) base spacer. The nucleotides in the spacer region can be replaced with a combination of nucleotides, so long as the two 13-base repeats are separated by eight nucleotides. It appears that the actual nucleotide sequence of the spacer is not critical; however, for the practice of the present disclosure, some substitutions of nucleotides in the space region may work better than others. The eight-base pair spacer is involved in DNA-DNA pairing during strand exchange. The asymmetry of the region determines the direction of site alignment in the recombination event, which will subsequently lead to either inversion or excision. As indicated above, most of the spacer can be mutated without a loss of function. See, for example, Schlake and Bode (1994) Biochemistry 33: 12746-12751, herein incorporated by reference. Novel FRT mutant sites can be used in the practice of the disclosed methods. Such mutant sites may be constructed by PCR-based mutagenesis. Although mutant FRT sites are known (see SEQ ID Nos 2, 3, 4 and 5 of WO1999/025821), it is recognized that other mutant FRT sites may be used in the practice of the present disclosure. The present disclosure is not restricted to the use of a particular FRT or recombination site, but rather that non-identical recombination sites or FRT sites can be utilized for targeted insertion and expression of nucleotide sequences in a plant genome. Thus, other mutant FRT sites can be constructed and utilized based upon the present disclosure.

[0214] As discussed above, bringing genomic DNA containing a target site with non-identical recombination sites together with a vector containing a T-DNA expression cassette with corresponding non-identical recombination sites, in the presence of the recombinase, results in recombination. The nucleotide sequence of the T-DNA expression cassette located between the flanking recombination sites is exchanged with the nucleotide sequence of the target site located between the flanking recombination sites. In this manner, nucleotide sequences of interest may be precisely incorporated into the genome of the host.

[0215] It is recognized that many variations of the present disclosure can be practiced. For example, target sites can be constructed having multiple non-identical recombination sites. Thus, multiple genes or nucleotide sequences can be stacked or ordered at precise locations in the plant genome. Likewise, once a target site has been established within the genome, additional recombination sites may be introduced by incorporating such sites within the nucleotide sequence of the T-DNA expression cassette and the transfer of the sites to the target sequence. Thus, once a target site has been established, it is possible to subsequently add sites, or alter sites through recombination.

[0216] Another variation includes providing a promoter or transcription initiation region operably linked with the target site in an organism. Preferably, the promoter will be 5′ to the first recombination site. By transforming the organism with a T-DNA expression cassette comprising a coding region, expression of the coding region will occur upon integration of the T-DNA expression cassette into the target site. This aspect provides for a method to select transformed cells, particularly plant cells, by providing a selectable marker sequence as the coding sequence.

[0217] Other advantages of the present system include the ability to reduce the complexity of integration of transgenes or transferred DNA in an organism by utilizing T-DNA expression cassettes as discussed above and selecting organisms with simple integration patterns. In the same manner, preferred sites within the genome can be identified by comparing several transformation events. A preferred site within the genome includes one that does not disrupt expression of essential sequences and provides for adequate expression of the transgene sequence.

[0218] The disclosed methods also provide for means to combine multiple expression cassettes at one location within the genome. Recombination sites may be added or deleted at target sites within the genome.

[0219] Any means known in the art for bringing the three components of the system together may be used in the present disclosure. For example, a plant can be stably transformed to harbor the target site in its genome. The recombinase may be transiently expressed or provided. Alternatively, a nucleotide sequence capable of expressing the recombinase may be stably integrated into the genome of the plant. In the presence of the corresponding target site and the recombinase, the T-DNA expression cassette, flanked by corresponding non-identical recombination sites, is inserted into the transformed plant's genome.

[0220] Alternatively, the components of the system may be brought together by sexually crossing transformed plants. In this aspect, a transformed plant, parent one, containing a target site integrated in its genome can be sexually crossed with a second plant, parent two, that has been genetically transformed with a T-DNA expression cassette containing flanking non-identical recombination sites, which correspond to those in plant one. Either plant one or plant two contains within its genome a nucleotide sequence expressing recombinase. The recombinase may be under the control of a constitutive or inducible promoter. In this manner, expression of recombinase and subsequent activity at the recombination sites can be controlled.

[0221] The disclosed methods are useful in targeting the integration of transferred nucleotide sequences to a specific chromosomal site. The nucleotide sequence may encode any nucleotide sequence of interest. Particular genes of interest include those which provide a readily analyzable functional feature to the host cell and/or organism, such as marker genes, as well as other genes that alter the phenotype of the recipient cells, and the like. Thus, genes effecting plant growth, height, susceptibility to disease, insects, nutritional value, and the like may be utilized in the present disclosure. The nucleotide sequence also may encode an ‘antisense’ sequence to turn off or modify gene expression.

[0222] It is recognized that the nucleotide sequences will be utilized in a functional expression unit or T-DNA expression cassette. By functional expression unit or T-DNA expression cassette is intended, the nucleotide sequence of interest with a functional promoter, and in most instances a termination region. There are various ways to achieve the functional expression unit within the practice of the present disclosure. In one aspect of the present disclosure, the nucleic acid of interest is transferred or inserted into the genome as a functional expression unit.

[0223] Alternatively, the nucleotide sequence may be inserted into a site within the genome which is 3′ to a promoter region. In this latter instance, the insertion of the coding sequence 3′ to the promoter region is such that a functional expression unit is achieved upon integration. The T-DNA expression cassette will comprise a transcriptional initiation region, or promoter, operably linked to the nucleic acid encoding the peptide of interest. Such an expression cassette is provided with a plurality of restriction sites for insertion of the gene or genes of interest to be under the transcriptional regulation of the regulatory regions.

[0224] Methods of characterizing plant cells including, but not limited to, genotyping DNA isolated from a plant cell, measuring RNA transcripts isolated from a plant cell, measuring nucleosome abundance or densities of chromatin isolated from a plant cell, measuring post-translational modifications of histone proteins of chromatin isolated from a plant cell, measuring epigenetic modifications of DNA or RNA isolated from a plant cell, measuring protein:DNA interactions of chromatin isolated from a plant cell, and measuring protein:RNA interactions or complexes isolated from a plant cell are useful in the methods of the present disclosure.

[0225] The characterization information and data from plants cells generated in the methods of the present disclosure is used to predict phenotypic performance the plant cells and facilitate breeding decisions earlier in the development process. Methods of predicting phenotypic performance of plant cells including, but not limited to, using genomic data based on genotyping by DNA sequencing of a plant cell, using genomic data based on genotyping by assay of a plant cell, using genomic data based on a known or predicted expression state of a plant cell, using genomic data based on a known or predicted chromatin state of a plant cell, using genomic data based on a known or predicted epigenetic regulatory state of a plant cell, and using genotype imputation of shared haplotype genomic data of a plant cell and/or pedigree history data of a plant cell are useful in the methods of the present disclosure and facilitate the plant breeding process.

[0226] Methods of characterizing plant cells and predicting phenotypic performance are known in the art and are disclosed in U.S. Pat. Nos. 6,399,855, 8,039,686, 8,321,147, U.S. Ser. No. 10/031,116, U.S. Ser. No. 10/102,476, US20160321396, US20170245446, US20170359978, and US20180363069 all of which are incorporated herein by reference in their entireties.

### EXPERIMENTAL

### Example 1: Plasmids

[0227] See Table 9 for a description of the plasmids comprising the indicated components referenced in the Examples. Plasmid IDs followed by a “+” comprise T-DNA containing the indicated components and additional indicated components located beyond the T-DNA Left Border (LB). As is within the skill in the art, the additional components may alternatively be located beyond the T-DNA Right Border (RB).

TABLE 9

| SEQ ID | Plasmid | |
|---|---|---|
| NO: | ID | Plasmid Components |
| 181 | PHP87078 | RB + FMV ENH:PSCV ENH:MMV ENH:ZM-PLTP |
| | | PRO::ZM-WUS2::IN2-1 TERM + SB-UBI PRO::ZS- |
| | | GREEN1::OS-UBI TERM + LB |
| 182 | PHP88158 | RB + FMV ENH:PSCV ENH:MMV ENH:ZM-PLTP |
| | | PRO::ZM-WUS2::IN2-1 TERM + NOS PRO::CRC::SB- |
| | | GKAF TERM + LB |
| 183 | PHP86491 | RB + SB-UBI PRO::ZS-GREEN1::OS-UBI TERM + |
| | | SB-ALS PRO::ZM-HRA::PINII TERM + LB |
| 184 | PHP71539 | pVIR9 |
| 185 | RV038288 | RB + FMV ENH:PSCV ENH:MMV ENH:ZM-3XEME- |
| | | ZM-PME10 PRO::ZM-WUS2::IN2-1 TERM + NOS |
| | | PRO::CRC:SB-GKAF TERM (MOD1) + LB |
| 186 | RV020636 | RB + FMV ENH:PSCV ENH:MMV ENH:ZM-PLTP |
| | | PRO:3XEME::ZM-WUS2::IN2-1 TERM + NOS |
| | | PRO::CRC:SB-GKAF TERM (MOD1) + LB |
| 187 | RV022819 | RB + FMV ENH:PSCV ENH:MMV ENH:ZM-PLTP |
| | | PRO::ZM-WUS2:GALLS^{C27}::IN2-1 TERM + NOS |
| | | PRO::CRC:SB-GKAF TERM (MOD1) + LB |
| 188 | RV022820 | RB + FMV ENH:PSCV ENH:MMV ENH:ZM-PLTP |
| | | PRO::ZM-WUS2:virF^{C127}::IN2-l TERM + NOS |
| | | PRO::CRC:SB-GKAF TERM (MOD1) + LB |
| 189 | RV006010 | RB + UBIZM PRO::CAS9(SP) (MO) + ZM-U6 |
| | | POLIII::crRNA-tracRNA fusion transcript + RAB17 |
| | | PRO::MO-CRE + UBIZM PRO::NPTII + CAMV35S |
| | | ENH::LTP2 PRO::AM-CYAN + LB |
| 190 | PHP91522 | LB + ZmUbi1 3′ UTR::IPK1 eZFN 12::ZmUbi1 |
| | | promoter + ZmGlob1::IPK1 eZFN Target |
| | | Sequence::IPK1 Left Homology Arm::DSM2::IPK1 |
| | | Right Homology Arm::IPK1 eZFN Target |
| | | Sequence::Zm B-Peru::AtuNOS 3′UTR + RB |
| 191 | PHP90308 | LB + ZmUbi1 3′ UTR:: Event 32 eZFN 12::ZmUbi1 |
| | | promoter + ZmGlob1:: Event 32 eZFN Target Sequence:: |
| | | Event 32 Left Homology Arm::DSM2:: Event 32 Right |
| | | Homology Arm:: Event 32 eZFN Target Sequence::Zm |
| | | B-Peru::AtuNOS 3′UTR + RB |
| 192 | PHP90670 | RB + ZM-UBI TERM::6FRAME STOPS1::FOKI- |
| | | V33:EXZFN10618.2:ZM-OP2 NLS-V1:T2A:FOKI- |
| | | V33:ZM-OP2 NLS-V1:UBI1ZM INTRON1:UBI1ZM |
| | | 5UTR (PHI)::UBI1ZM PRO-V3 + ZM-GLB PRO::ZM- |
| | | C1-V3::6FRAME STOPS2::NOS TERM + ZM-GLB |
| | | PRO::AGTRT34308.1::AGTRT34309.1::UBI1ZM PRO- |
| | | V12::UBI1ZM 5UTR (PHI)::UBI1ZM INTRON1- |
| | | V4::DHTGE970.17::6FRAME STOPS1_ZM- |
| | | LIP404.1::TERM::AGTRT34311.1::AGTRT34308.1::ZM- |
| | | BP-V2_6FRAME STOPS1::NOS TERM + LB |
| 193 | RV025340 | RB + UBI PRO::CFP::PINII TERM + 3XENH::ZM-PLTP |
| | | PRO::ZM-ODP2::IN2-1 TERM + LB |
| 194 | PHP91539 | RB + 3XENH::ZM-PLTP PRO::ZM-WUS2::IN2-1 TERM + |
| | | ZM-PLTP1 PRO::ZM-ODP2::OS-T28 TERM + NOS |
| | | PRO::CRC::SB-GKAF TERM + LB |
| 317 | RV036376 | RB + UBIZM PRO::CAS9(SP) (MO) + ZM-U6 |
| | | POLIII::crRNA-tracRNA fusion transcript + |
| | | RAB17 PRO::MO-CRE + ZM-PLTP PRO::ZM-PLTP |
| | | 5 UTR: ZM-ODP2 (ALT1):OS-T28 TERM + |
| | | UBIZM PRO::NPTII + LB |
| 344 | PHV00002 | FRT1 + NPTII::PINII TERM + UBI1ZM PRO::UBI1ZM |
| | | INTRON1::ZS-GREEN1::PINII TERM + FRT6 |
| 345 | PHV00003 | RB + UBI1ZM PRO::UBI1ZM INTRON1::FLPM- |
| | | EXON1::ST-LS1 INTRON2-V2::FLPM-EXON2::PINII + |
| | | FRT1 + NPTII::PINII TERM + UBI1ZM PRO::UBI1ZM |
| | | INTRON1::DS-RED2 (ALT1)::PINII TERM + FRT6 + LB |
| 346 | PHV00004 | ZM1UBI PRO::FLPm::PINII TERM |
| 347 | PHV00005 | 3XENH::PLTP PRO::WUS2::IN2-1 TERM |
| 348 | PHV00007 | RB + LOXP + AXIG1::WUS2::IN2-1 TERM + |
| | | PLTP::ODP2::PINII TERM::CZ19B1 TERM + ZM1UBI |
| | | PRO:: ZM1UBI 5UTR:: ZM1UBI INTRON1::NLS::CAS9 |
| | | EXON1::ST-LS1 INTRON2::CAS9 EXON2::VIRD2 |
| | | NLS::PINII TERM + ZM-U6 POLIII CHR8 PRO::ZM- |
| | | CHR1-52.56-8CR1::GUIDE RNA::ZM-U6 POLIII CHR8 |
| | | TERM + ZM-HSP18A PRO::MO-CRE EXON1:: ST-LS1 |
| | | INTRON2::MO-CRE EXON2::PINII TERM + HR1 + |
| | | LOXP + ZM1UBI PRO::FRT1::NPTII::PINII TERM + |
| | | FRT6 + HR2 + LB |
| 349 | PHV00008 | HR1 + LOXP + ZM1UBI PRO::ZM1UBI 5UTR:: ZM1UBI |
| | | INTRON1:: FRT1::NPTII::PINII TERM + FRT6 + HR2 |
| 352 | PHV00009 | ZM1UBI PRO:: ZM1UBI 5UTR:: ZM1UBI |
| | | INTRON1::NLS::CAS9 EXON1::ST-LS1 |
| | | INTRON2::CAS9 EXON2::VIRD2 NLS::PINII TERM |
| 353 | PHV00010 | ZM-U6 POLIII CHR8 PRO::ZM-CHR1-52.56- |
| | | 8CR1::GUIDE RNA::ZM-U6 POLIII CHR8 TERM |

### Example 2: Culture Media

[0228] See Tables 10-15 for a description of the media formations for transformation, selection and regeneration referenced in the Examples.

TABLE 10

| | Units | | | | | | | | |
|---|---|---|---|---|---|---|---|---|---|
| | per | | | | | | | | |
| Medium components | liter | 12R | 810K | 700A | 710I | 605J | 605T | 562V | 289Q |
| MS BASAL SALT | g | | | 4.3 | 4.3 | 4.3 | 4.3 | | 4.3 |
| MIXTURE | | | | | | | | | |
| N6 BASAL SALTS | g | | | | | | | 4.0 | |
| N6 | ml | | | | | 60.0 | 60.0 | | |
| MACRONUTRIENTS | | | | | | | | | |
| 10X | | | | | | | | | |
| POTASSIUM | g | | | | | 1.7 | 1.7 | | |
| NITRATE | | | | | | | | | |
| B5H MINOR SALTS | ml | | | | | 0.6 | 0.6 | | |
| 1000X | | | | | | | | | |
| NaFe EDTA | ml | | | | | 6.0 | 6.0 | | |
| FOR B5H 100X | | | | | | | | | |
| ERIKSSON’S | ml | | | | | 0.4 | 0.4 | 1.0 | |
| VITAMINS 1000X | | | | | | | | | |
| S&H VITAMIN | ml | | | | | 6.0 | 6.0 | | |
| STOCK 100X | | | | | | | | | |
| THIAMINE • HCL | mg | | | 10.0 | 10.0 | 0.5 | 0.5 | 0.5 | |
| L-PROLINE | g | | | | 0.7 | 2.0 | 2.0 | 0.69 | 0.7 |
| CASEIN | g | | | | | 0.3 | 0.3 | | |
| HYDROLYSATE | | | | | | | | | |
| (ACID) | | | | | | | | | |
| SUCROSE | g | | | 68.5 | 20.0 | 20.0 | 20.0 | 30.0 | 60.0 |
| GLUCOSE | g | 5.0 | | 36.0 | 10.0 | 0.6 | 0.6 | | |
| MALTOSE | g | | | | | | | | |
| 2,4-D | mg | | | 1.5 | 2.0 | 0.8 | 0.8 | 2.0 | |
| AGAR | g | 15.0 | | | 8.0 | 6.0 | 6.0 | 8.0 | 8.0 |
| BACTO-AGAR | g | | 15.0 | | | | | | |
| PHYTAGEL | g | | | | | | | | |
| DICAMBA | g | | | | | 1.2 | 1.2 | | |
| SILVER NITRATE | mg | | | | | 3.4 | 3.4 | 0.85 | |
| AGRIBIO | mg | | | | | 100.0 | | | |
| Carbenicillin | | | | | | | | | |
| Timentin | mg | | | | | | 150.0 | | 150.0 |
| Cefotaxime | mg | | | | | | 100.0 | | 100.0 |
| MYO-INOSITOL | g | | | 0.1 | 0.1 | | | | 0.1 |
| NICOTINIC ACID | mg | | | 0.5 | 0.5 | | | | |
| PYRIDOXINE • HCL | mg | | | 0.5 | 0.5 | | | | |
| VITAMIN ASSAY | g | | | 1.0 | | | | | |
| CASAMINO ACIDS | | | | | | | | | |
| MES BUFFER | g | | | | 0.5 | | | | |
| ACETOSYRINGONE | uM | | | | 100.0 | | | 100.0 | |
| ASCORBIC ACID | mg | | | | 10.0 | | | | |
| 10 MG/ML (7S) | | | | | | | | | |
| MS VITAMIN STOCK | ml | | | | | | | | 5.0 |
| SOL. | | | | | | | | | |
| ZEATIN | mg | | | | | | | | 0.5 |
| CUPRIC SULFATE | mg | | | | | | | | 1.3 |
| IAA 0.5 MG/ML (28A) | ml | | | | | | | | 2.0 |
| ABA 0.1 mm | ml | | | | | | | | 1.0 |
| THIDIAZURON | mg | | | | | | | | 0.1 |
| AGRIBIO | mg | | | | | | | | 100.0 |
| Carbenicillin | | | | | | | | | |
| PPT(GLUFOSINATE- | mg | | | | | | | | |
| NH4) | | | | | | | | | |
| BAP | mg | | | | | | | | 1.0 |
| YEAST EXTRACT | g | | 5.0 | | | | | | |
| (BD Difco) | | | | | | | | | |
| PEPTONE | g | | 10.0 | | | | | | |
| SODIUM CHLORIDE | g | | 5.0 | | | | | | |
| SPECTINOMYCIN | mg | 50.0 | 50.0 | | | | | | |
| FERROUS | ml | 2.0 | | | | | | | |
| SULFATE • 7H20 | | | | | | | | | |
| AB BUFFER | ml | 50.0 | | | | | | | |
| 20X (12D) | | | | | | | | | |
| AB SALTS 20X (12E) | ml | 50.0 | | | | | | | |
| THYMIDINE | mg | 50.0 | 50.0 | 50.0 | | | | 50.0 | |
| GENTAMYCIN | mg | 50.0 | 50.0 | | | | | | |
| Benomyl | mg | | | | | | | | |
| pH | | | 6.8 | 5.2 | 5.8 | 5.8 | 5.8 | 5.8 | 5.6 |

TABLE 11

| | Units | | | | |
|---|---|---|---|---|---|
| | per | | | | |
| Medium components | liter | 20A | 70A | 70B | 70C |
| MS BASAL SALT | g | 4.3 | 4.3 | 4.3 | 4.3 |
| MIXTURE | | | | | |
| THIAMINE·HCL | mg | 0.12 | 0.12 | 0.12 | 0.12 |
| SUCROSE | g | | 20 | 20 | 20 |
| PVP40 | g | | 0.5 | 0.5 | 0.5 |
| TC AGAR | g | | 5 | 5 | 5 |
| SILVER NITRATE | mg | | 2.0 | 2.0 | 2.0 |
| AGRIBIO Carbenicillin | g | | 0.5 | 0.5 | 0.5 |
| Adenine Hemisulfate Salt | mg | | 40 | 40 | 40 |
| MYO-INOSITOL | g | 0.1 | 0.1 | 0.1 | 0.1 |
| NICOTINIC ACID | mg | 0.57 | 0.57 | 0.57 | 0.57 |
| PYRIDOXINE·HCL | mg | 0.57 | 0.57 | 0.57 | 0.57 |
| Glycine | mg | 2.3 | 2.3 | 2.3 | 2.3 |
| MES BUFFER | g | 0.5 | 0.5 | 0.5 | 0.5 |
| ACETOSYRINGONE | uM | 200 | | | |
| NAA | mg | 0.1 | 0.1 | 0.1 | 0.1 |
| BAP | mg | 1.0 | 1.0 | 1.0 | 1.0 |
| Gibberellic Acid | ug | 10 | 10 | 10 | 10 |
| SPECTINOMYCIN | mg | | 5 | 10 | 10 |
| pH | | 5.5 | 5.7 | 5.7 | 5.7 |

[0229] The compositions of various media used in soybean transformation, tissue culture and regeneration are outlined in Table 12. In this table, medium M1 is used for initiation of suspension cultures, if this is the starting material for transformation. Media M2 and M3 represent typical co-cultivation media useful for Agrobacterium transformation of the entire range of explants listed above. Medium M4 is useful for selection (with the appropriate selective agent), M5 is used for somatic embryo maturation, and medium M6 is used for germination to produce TO plantlets.

TABLE 12

| | M1 | | M2 | | M3 | | M4 | | M5 | | M6 | |
|---|---|---|---|---|---|---|---|---|---|---|---|---|
| MS salt with | 4.44 | g/L | | | | | 4.4 | g/L | 4.44 | g/L | | |
| B5 vitamins | | | | | | | | | | | | |
| (PhytoTech | | | | | | | | | | | | |
| M404) | | | | | | | | | | | | |
| Gamborg B-5 | | | | | | | | | | | 3.21 | g/L |
| basal medium | | | | | | | | | | | | |
| (PhytoTech | | | | | | | | | | | | |
| G398) | | | | | | | | | | | | |
| Modified | | | 2.68 | g/L | 2.68 | g/L | | | | | | |
| MS salt | | | | | | | | | | | | |
| (PhytoTech | | | | | | | | | | | | |
| M571) | | | | | | | | | | | | |
| B5 vitamins | | | 1 | ml | 1 | ml | 1 | ml | | | | |
| (1000X) | | | | | | | | | | | | |
| (PhytoTech | | | | | | | | | | | | |
| G249) | | | | | | | | | | | | |
| 2,4-D stock | 4 | ml | 1 | ml | 1 | ml | 4 | ml | | | | |
| 10 mg/ml | | | | | | | | | | | | |
| KNO₃ | | | 1.64 | g/L | 1.64 | g/L | | | | | | |
| (NH₄)₂SO₄ | | | 0.463 | g/L | 0.463 | g/L | | | | | | |
| Asparagine | | | 1 | g/L | 1 | g/L | | | | | | |
| Sucrose | | | 68.5 | g/L | 85.6 | g/L | | | | | 20 | g/L |
| Glucose | 31.5 | g/L | 36 | g/L | 49.6 | g/L | 31.5 | g/l | | | | |
| Maltose | | | | | | | | | 60 | g/L | | |
| MgCl_{2.}6H₂O | | | | | | | | | 0.75 | g/L | | |
| Activated | | | | | | | | | 5 | g/L | | |
| charcoal | | | | | | | | | | | | |
| (PhytoTech | | | | | | | | | | | | |
| C325) | | | | | | | | | | | | |
| Casein | | | 1 | g/L | 1 | g/L | | | | | | |
| hydrolysate | | | | | | | | | | | | |
| (PhytoTech | | | | | | | | | | | | |
| C184) | | | | | | | | | | | | |
| pH | 7.0 | | 5.4 | | 5.4 | | 7.0 | | 5.7 | | 5.7 | |
| Acetosyringone | | | 300 | μM | 300 | μM | | | | | | |
| TC agar | 4 | g/L | | | | | | | | | 5 | g/L |
| Gelrite (Plant | | | | | | | 2 | g/l | 2 | g/L | | |
| Media Cat# | | | | | | | | | | | | |
| 714246) | | | | | | | | | | | | |

TABLE 13
Media used for sorghum transformation.
Medium Composition

PHI-I: 4.3 g/l MS salts (Phytotechnology Laboratories, Shawnee Mission, KS, catalog
number M524), 0.5 mg/l nicotinic acid, 0.5 mg/l pyridoxine HCl, 1 mg/l thiamine HCl,
0.1 g/l myo-inositol, 1 g/l casamino acids (Becton Dickinson and Company, B D
Diagnostic Systems, Sparks, MD, catalog number 223050), 1.5 mg/l 2,4-
dichlorophenoxyacetic acid (2,4-D), 68.5 g/l sucrose, 36 g/l glucose, pH 5.2; with
100 μM acetosyringone added before using.
PHI-T: PHI-I with 20 g/l sucrose, 10 g/l glucose, 2 mg/l 2,4-D, no casamino acids,
0.5 g/l MES buffer, 0.7 g/l L-proline, 10 mg/l ascorbic acid, 100 μM acetosyringone,
8 g/l agar, pH 5.8.
PHI-U: PHI-T with 1.5 mg/l 2,4-D 100 mg/l carbenicillin, 30 g/l sucrose, no glucose
and acetosyringone; 5 mg/l PPT, pH 5.8.
PHI-UM: PHI-U with 12.5 g/l mannose and 5 g/l maltose, no sucrose, no PPT, pH 5.8
PHI-V: PHI-U with 10 mg/l PPT
DBC3: 4.3 g/l MS salts, 0.25 g/l myo-inositol, 1.0 g/l casein hydrolysate, 1.0 mg/l
thiamine HCL, 1.0 mg/l 2,4-D, 30 g/l maltose, 0.69 g/l L-proline, 1.22 mg/l cupric
sulfate, 0.5 mg/l BAP, 3.5 g/l phytagel, pH 5.8
PHI-X: 4.3 g/l MS salts, 0.1 g/l myo-inositol, 5.0 ml MS vitamins stock^{b}, 0.5 mg/l
zeatin, 700 mg/l L-proline, 60 g/l sucrose, 1 mg/l indole-3-acetic acid, 0.1 μM abscisic
acid, 0.1 mg/l thidiazuron, 100 mg/l carbenicillin, 5 mg/l PPT, 8 g/l agar, pH 5.6.
PHI-XM: PHI-X with no PPT; added 1.25 mg/l cupric sulfate, pH 5.6.
PHI-Z: 2.15 g/l MS salts, 0.05 g/l myo-inositol, 2.5 ml MS vitamins stock^{b}, 20 g/l
sucrose, 3 g/l phytagel, pH 5.6
^{a}PHI-I, PHI-T, PHI-U, PHI-V, PHI-X, and PHI-Z media from Zhao et al. 2000
^{b}MS vitamins stock: 0.1 g/l nicotinic acid, 0.1 g/l pyridoxine HCl, 0.02 g/l thiamine HCl, 0.4 g/l glycine.

TABLE 14
Media used for wheat transformation.

| | 716B | | 606 | | 689E | |
|---|---|---|---|---|---|---|
| Ingredient | Quantity | | Quantity | | Quantity | |
| D-I WATER, POLISHED | 950 | ml | 950 | ml | 950 | ml |
| MS BASAL SALT MIXTURE | 4.3 | g | 4.3 | g | 4.3 | g |
| CHU(N6) BASAL SALTS | | | 2.39 | g | | |
| POTASSIUM NITRATE | | | 1.68 | g | | |
| B5H MINOR SALTS 1000× | | | 0.6 | ml | | |
| NaFe EDTA FOR B5H 100× | | | 6 | ml | | |
| ERIKSSON'S VITAMINS 1000× | | | 0.4 | ml | | |
| S&H VITAMIN STOCK 100× | | | 6 | ml | | |
| L-PROLINE | | | 1.98 | g | | |
| CASEIN HYDROLYSATE | | | 0.3 | g | | |
| (ACID) | | | | | | |
| MALTOSE | | | 30 | g | | |
| GLUCOSE | | | 10 | g | | |
| MYO-INOSITOL | 0.1 | g | | | 1.1 | g |
| MS VITAMIN STOCK SOLN* | 5 | ml | | | 5 | ml |
| 2,4-D 0.5 mg/ml | 1 | ml | 1.6 | ml | | |
| CUPRIC SULFATE 1 MG/ML | | | 1.22 | ml | | |
| BAP 1 MG/ML | | | 0.5 | ml | | |
| Picloram 10 mg/ml | 0.2 | ml | | | | |
| MALTOSE | 30 | g | | | | |
| MES BUFFER | 1.95 | g | | | | |
| CUPRIC SULFATE 1 MG/ML | 1.22 | ml | | | | |
| BAP 1 MG/ML | 0.5 | ml | | | | |
| TC-AGAR | | | | | 6 | g |
| PHYTAGEL | 2.5 | g | 3.5 | g | 3.5 | g |
| pH | 5.8 | | 5.8 | | 5.8 | |
| ACETOSYRINGONE 100 mM | 4 | ml | | | | |
| thymidine (50 mg/ml) | 1 | ml | 0.5 | ml | | |
| Dicamba (1 mg/ml) | | | 1.2 | ml | | |
| Cefotaxime (250 mg/ml) | | | 0.4 | ml | 0.4 | ml |
| sucrose | | | | | 60 | g |
| phosphinothricin (1 mg/ml) | | | | | 5 | ml |

*MS Vitamin Stock: 0.1 g/l nicotinic acid, 0.02 g/l thiamine, 0.1 g/l pyridoxine, 0.4 g/l glycine

TABLE 15
Media used for maize transformation.

| | Units | | | | | | | |
|---|---|---|---|---|---|---|---|---|
| | per | | | | | | | |
| Medium components | liter | 12V | 810I | 700 | 710I | 605J | 605T | 289Q |
| MS BASAL SALT MIXTURE | g | | | 4.3 | 4.3 | 4.3 | 4.3 | 4.3 |
| N6 MACRONUTRIENTS 10X | ml | | | | | 60.0 | 60.0 | |
| POTASSIUM NITRATE | g | | | | | 1.7 | 1.7 | |
| B5H MINOR SALTS 1000X | ml | | | | | 0.6 | 0.6 | |
| NaFe EDTA FOR B5H 100X | ml | | | | | 6.0 | 6.0 | |
| ERIKSSON’S VITAMINS | ml | | | | | 0.4 | 0.4 | |
| 1000X | | | | | | | | |
| S&H VITAMIN STOCK 100X | ml | | | | | 6.0 | 6.0 | |
| THIAMINE • HCL | mg | | | 10.0 | 10.0 | 0.5 | 0.5 | |
| L-PROLINE | g | | | | 0.7 | 2.0 | 2.0 | 0.7 |
| CASEIN HYDROLYSATE | g | | | | | 0.3 | 0.3 | |
| (ACID) | | | | | | | | |
| SUCROSE | g | | | 68.5 | 20.0 | 20.0 | 20.0 | 60.0 |
| GLUCOSE | g | 5.0 | | 36.0 | 10.0 | 0.6 | 0.6 | |
| MALTOSE | g | | | | | | | |
| 2,4-D | mg | | | 1.5 | 2.0 | 0.8 | 0.8 | |
| AGAR | g | 15.0 | 15.0 | | 8.0 | 6.0 | 6.0 | 8.0 |
| PHYTAGEL | g | | | | | | | |
| DICAMBA | g | | | | | 1.2 | 1.2 | |
| SILVER NITRATE | mg | | | | | 3.4 | 3.4 | |
| AGRIBIO Carbenicillin | mg | | | | | 100.0 | | |
| Timentin | mg | | | | | | 150.0 | 150.0 |
| Cefotaxime | mg | | | | | | 100.0 | 100.0 |
| MYO-INOSITOL | g | | | 0.1 | 0.1 | | | 0.1 |
| NICOTINIC ACID | mg | | | 0.5 | 0.5 | | | |
| PYRIDOXINE • HCL | mg | | | 0.5 | 0.5 | | | |
| VITAMIN ASSAY | g | | | 1.0 | | | | |
| CAS AMINO ACIDS | | | | | | | | |
| MES BUFFER | g | | | | 0.5 | | | |
| ACETOSYRINGONE | uM | | | | 100.0 | | | |
| ASCORBIC ACID 10 | mg | | | | 10.0 | | | |
| MG/ML (7S) | | | | | | | | |
| MS VITAMIN STOCK SOL. | ml | | | | | | | 5.0 |
| ZEATIN | mg | | | | | | | 0.5 |
| CUPRIC SULFATE | mg | | | | | | | 1.3 |
| IAA 0.5 MG/ML (28A) | ml | | | | | | | 2.0 |
| ABA 0.1 mm | ml | | | | | | | 1.0 |
| THIDIAZURON | mg | | | | | | | 0.1 |
| AGRIBIO Carbenicillin | mg | | | | | | | 100.0 |
| PPT(GLUFOSINATE-NH4) | mg | | | | | | | |
| BAP | mg | | | | | | | 1.0 |
| YEAST EXTRACT (BD Difco) | g | | 5.0 | | | | | |
| PEPTONE | g | | 10.0 | | | | | |
| SODIUM CHLORIDE | g | | 5.0 | | | | | |
| SPECTINOMYCIN | mg | 50.0 | 100.0 | | | | | |
| FERROUS SULFATE • 7H20 | ml | 2.0 | | | | | | |
| AB BUFFER 20X (12D) | ml | 50.0 | | | | | | |
| AB SALTS 20X (12E) | ml | 50.0 | | | | | | |
| Benomyl | mg | | | | | | | |
| pH | | | | | | | | 5.6 |

| | Units | | | | | | | |
|---|---|---|---|---|---|---|---|---|
| | per | | | | | | | |
| Medium components | liter | 289R | 13158H | 13224B | 13266K | 272X | 272V | 13158 |
| MS BASAL SALT MIXTURE | g | 4.3 | 4.3 | | 4.3 | 4.3 | 4.3 | 4.3 |
| N6 MACRONUTRIENTS 10X | ml | | | 4.0 | 60.0 | | | |
| POTASSIUM NITRATE | g | | | | 1.7 | | | |
| B5H MINOR SALTS 1000X | ml | | | | 0.6 | | | |
| NaFe EDTA FOR B5H 100X | ml | | | | 6.0 | | | |
| ERIKSSON’S VITAMINS | ml | | | 1.0 | 0.4 | | | |
| 1000X | | | | | | | | |
| S&H VITAMIN STOCK 100X | ml | | | | 6.0 | | | |
| THIAMINE • HCL | mg | | | 0.5 | 0.5 | | | |
| L-PROLINE | g | 0.7 | 0.7 | 2.9 | 2.0 | | | |
| CASEIN HYDROLYSATE | g | | | | 0.3 | | | |
| (ACID) | | | | | | | | |
| SUCROSE | g | 60.0 | 60.0 | 190.0 | 20.0 | 40.0 | 40.0 | 40.0 |
| GLUCOSE | g | | | | 0.6 | | | |
| MALTOSE | g | | | | | | | |
| 2,4-D | mg | | | | 1.6 | | | |
| AGAR | g | | 8.0 | 6.4 | 6.0 | 6.0 | 6.0 | 6.0 |
| PHYTAGEL | g | | | | | | | |
| DICAMBA | g | | | | 1.2 | | | |
| SILVER NITRATE | mg | | | 8.5 | 1.7 | | | |
| AGRIBIO Carbemcillin | mg | | | | 2.0 | | | |
| Timentin | mg | 150.0 | 150.0 | | | | | |
| Cefotaxime | mg | 100.0 | 100.0 | 25 | 25 | | | |
| MYO-INOSITOL | g | 0.1 | 0.1 | | | 0.1 | 0.1 | 0.1 |
| NICOTINIC ACID | mg | | | | | | | |
| PYRIDOXINE•HCL | mg | | | | | | | |
| VITAMIN ASSAY | g | | | | | | | |
| CAS AMINO ACIDS | | | | | | | | |
| MES BUFFER | g | | | | | | | |
| ACETOSYRINGONE | uM | | | | | | | |
| ASCORBIC ACID 10 | mg | | | | | | | |
| MG/ML (7S) | | | | | | | | |
| MS VITAMIN STOCK SOL. | ml | 5.0 | 5.0 | | | 5.0 | 5.0 | 5.0 |
| ZEATIN | mg | 0.5 | 0.5 | | | | | |
| CUPRIC SULFATE | mg | 1.3 | 1.3 | | | | | |
| IAA 0.5 MG/ML (28A) | ml | 2.0 | 2.0 | | | | | |
| ABA 0.1 mm | ml | 1.0 | 1.0 | | | | | |
| THIDIAZURON | mg | 0.1 | 0.1 | | | | | |
| AGRIBIO Carbemcillin | mg | | | | | | | |
| PPT(GLUFOSINATE-NH4) | mg | | | | | | | |
| BAP | mg | | | | | | | |
| YEAST EXTRACT (BD Difco) | g | | | | | | | |
| PEPTONE | g | | | | | | | |
| SODIUM CHLORIDE | g | | | | | | | |
| SPECTINOMYCIN | mg | | | | | | | |
| FERROUS SULFATE • 7H20 | ml | | | | | | | |
| AB BUFFER 20X (12D) | ml | | | | | | | |
| AB SALTS 20X (12E) | ml | | | | | | | |
| Benomyl | mg | | | | | | | 100.0 |
| pH | | | | | | 0.5 | 5.6 | |

### Example 3: Agrobacterium-Mediated Transformation of Corn

### A. Preparation of Agrobacterium Master Plate.

[0230] Agrobacterium tumefaciens harboring a binary donor vector was streaked out from a −80° C. frozen aliquot onto solid 12R medium and cultured at 28° C. in the dark for 2-3 days to make a master plate.

### B. Growing Agrobacterium on Solid Medium.

[0231] A single colony or multiple colonies of Agrobacterium were picked from the master plate and streaked onto a second plate containing 810K medium and incubated at 28° C. in the dark overnight.

[0232] Agrobacterium infection medium (700A; 5 ml) and 100 mM 3′-5′-Dimethoxy-4′-hydroxyacetophenone (acetosyringone; 5 μL) were added to a 14 mL conical tube in a hood. About 3 full loops of Agrobacterium from the second plate were suspended in the tube and the tube was then vortexed to make an even suspension. The suspension (1 ml) was transferred to a spectrophotometer tube and the optical density (550 nm) of the suspension was adjusted to a reading of about 0.35-1.0. The Agrobacterium concentration was approximately 0.5 to 2.0×10⁹ cfu/mL. The final Agrobacterium suspension was aliquoted into 2 mL microcentrifuge tubes, each containing about 1 mL of the suspension. The suspensions were then used as soon as possible.

### C. Growing Agrobacterium on Liquid Medium.

[0233] Alternatively, Agrobacterium can be prepared for transformation by growing in liquid medium. One day before infection, a 125 ml flask was prepared with 30 ml of 557A medium (10.5 g/l potassium phosphate dibasic, 4.5 g/l potassium phosphate monobasic anhydrous, 1 g/l ammonium sulfate, 0.5 g/l sodium citrate dehydrate, 10 g/l sucrose, 1 mM magnesium sulfate) and 30 μL spectinomycin (50 mg/mL) and 30 μL acetosyringone (20 mg/mL). A half loopful of Agrobacterium from a second plate was suspended into the flasks and placed on an orbital shaker set at 200 rpm and incubated at 28° C. overnight. The Agrobacterium culture was centrifuged at 5000 rpm for 10 min. The supernatant was removed and the Agrobacterium infection medium (700A) with acetosyringone solution was added. The bacteria were resuspended by vortex and the optical density (550 nm) of the Agrobacterium suspension was adjusted to a reading of about 0.35 to 2.0.

### D. Maize Transformation.

[0234] Ears of a maize (Zea mays L.) cultivar were surface-sterilized for 15-20 min in 20% (v/v) bleach (5.25% sodium hypochlorite) plus 1 drop of Tween 20 followed by 3 washes in sterile water. Immature embryos (IEs) were isolated from ears and were placed in 2 ml of the Agrobacterium infection medium (700A) with acetosyringone solution. The optimal size of the embryos varies based on the inbred, but for transformation with WUS2 and ODP2 a wide size range of immature embryo sizes could be used. After collecting all embryos, the 700A medium was removed and 1 mL of the Agrobacterium suspension was added to the embryos, the tube was vortexed for 5-10 seconds and incubated for approximately 5 minutes under sterile conditions. The treated embryos were then transferred on 562V (or 7101) co-cultivation medium (see Example 2) and the excess liquid was manually removed using a 1.0 mL pipet tip. Each embryo was placed flat side down. Each plate was incubated at 21° C. under dark conditions 1-3 days of co-cultivation. After 24 hours the treated embryos were transferred to resting medium (605J medium,) without selection.

### E. Chromosome Doubling

[0235] Preferentially, treated haploid embryos can be transferred to resting medium (605J medium) with a chromosome doubling (or mitotic inhibitor) agent, for example colchicine concentrations of 0.1-1.0 g/ml to cause mitotic arrest of dividing cells at metaphase by interfering with microtubule organization, for example for a 24-hour period before transfer to a resting medium (605J medium, or preferentially 605T medium) without a chromosome doubling agent followed by incubation at 28° C. under dark conditions. Three to 7 days later, the embryos were transferred to maturation medium (289Q medium) without selection.

### Example 4: Obtaining a Genetically Diverse Population of Maize Haploid Embryos

[0236] Seed from an F1 hybrid maize plant resulting from cross fertilization of two genetically different inbred parental strains were planted and the F1 hybrid plants were used as female parent plants (pollen receivers). Genetic diversity is created per ovule, with each ovule being a unique genetic entity due to meiotic recombination during megagametogenesis. Seeds from haploid inducer lines, such as Stock 6, RWS, KEMS, KMS, ZMS, or related derivatives were planted, and the resulting plants were used as male parent plants (pollen donors). The ears of the female parent plants were shoot-bagged before silk emergence. The silks of the ears on the plants of the female parent plants were pollinated with viable pollen grains collected from the anthers of the male parent plants (haploid inducer plants). This pollination was controlled by the method used regularly in maize breeding programs to avoid any foreign pollen contamination.

[0237] This results in the production of about 2-30% of all embryos being haploid embryos per ear, with frequencies known to differ per choice of the haploid inducer line used. At approximately 9-14 days after pollination, immature ears were harvested. The ears were surface sterilized in 30% Clorox bleach plus 0.5% Micro detergent for 20 minutes, and rinsed two times with sterile water, and then are used to isolate immature embryos from each ear.

[0238] The haploid embryos were isolated based on the identification of a visible marker gene in the inducer lines. For example, if the inducer line was a stable transformed line with a fluorescent reporter gene and/or has inherited an anthocyanin reporter gene, for example the R1-scm gene (see U.S. Pat. No. 8,859,846 incorporated herein by reference in its entirety), then gene regulation by a promoter allowing the fluorescent protein and/or anthocyanin synthesis in the embryos at an early developmental stage allows ploidy determination. For transgenic methods, typical promoters that are useful include the maize oleosin promoter or the Zea mays Ubiquitin promoter. After paternal genome elimination, the maternal haploid embryos have only one set of chromosomes from the female parent in the embryo cells and these haploid embryos will test negative for the presence of the visible marker gene. By using this kind of visible marker, haploid embryos were identified as those without the fluorescent reporter gene and/or R1-scm expression and selected from diploid embryos expressing a fluorescent protein or anthocyanin pigmentation.

[0239] Here, a haploid inducer with a R1-scm allele stably transformed with an expression cassette encoding a ZsYELLOW fluorescent protein operably linked to the Zea mays UBIQUITIN promoter (ZmUBIpro) was used as the pollen donor and typically resulted in approximately 25% of the immature embryos being haploid embryos. These haploid embryos were used in the experiments described herein.

### Example 5: Activating Clonal Propagation in Maize Haploid Embryos

[0240] The following experiments demonstrated that delivery of a plasmid containing WUS2 improved clonal propagation of wild type, non-transformed doubled haploids. In addition, the following experiments demonstrated that both the regulatory sequence controlling the morphogenic gene cassette as well as variation of the morphogenic protein per se affected frequencies for regenerating either transgenic or non-transgenic plants.

[0241] Immature embryos of a maize F1 hybrid were crossed with a haploid inducer as described in Example 4 were transformed with Agrobacterium strain LBA4404 THY− (See U.S. Pat. No. 8,334,429 incorporated herein by reference in its entirety) as described in Example 3 containing T-DNAs as described in Table 9. Specifically, Agrobacterium with plasmid PHP86491 (SEQ ID NO: 183) (Agro1) comprising two “Trait” expression cassettes (ZS-GREEN and ZM-HRA) was used alone as a control treatment. Agrobacterium (Agro2) with plasmid PHP88158 (SEQ ID NO: 182) comprising a WUS expression cassette operably linked to a 3× enhanced Zea mays PLTP (ZmPLTP) regulatory element and a CRC expression cassette operably linked to the NOS promoter regulatory element was used a positive control. For treatment 3 Agrobacterium with plasmid RV020636 (SEQ ID NO: 186) (Agro3) comprising a WUS expression cassette operably linked to a 3× enhanced ZmPLTP regulatory element with a maize-derived enhancer element (EME) positioned in triplicate (3×EME) near the ZmPLTP promoter TATA box and a CRC expression cassette operably linked to the NOS promoter regulatory element was used. For treatment 4 Agrobacterium with plasmid RV022819 (SEQ ID NO: 187) (Agro4) comprising a WUS expression cassette encoding a translational fusion peptide comprising the WUSCHEL protein and the C-terminus 27 amino acids of the Agrobacterium rhizogenes GALLS protein (ZM-WUS2:GALLS^{C27}) operably linked to a 3× enhanced ZmPLTP regulatory element and a CRC expression cassette operably linked to the NOS promoter regulatory element was used. For treatment 5 Agrobacterium with plasmid RV022820 (SEQ ID NO: 188) (Agro5) comprising a WUS expression cassette encoding a translational fusion peptide comprising the WUSCHEL protein and the C-terminus 127 amino acids of the Agrobacterium tumefaciens Virulence F (virF) protein (ZM-WUS2:virF^{C127}) operably linked to a 3× enhanced ZmPLTP regulatory element and a CRC expression cassette operably linked to the NOS promoter regulatory element was used.

[0242] Following maize transformation of each haploid embryo as described in Example 3, somatic embryogenesis on each treated haploid explant was activated. After approximately 6-10 days the proliferating callus tissue of each treated haploid embryo was dissected, and each portion of dissected tissue was transferred to maturation medium (289Q) with 0% colchicine and cultured at 26-28° C. under dark conditions. After approximately 6-10 days the sub-cultured tissues were transferred to a light culture room at 26° C. until healthy plantlets with good roots developed. Approximately 7-14 days later, plantlets were transferred to flats containing potting soil and grown for 1 week in a growth chamber and subsequently grown for an additional 1-2 weeks in the greenhouse, and then transplanted to soil in pots and grown under greenhouse conditions.

[0243] After regenerated plants were grown on soil, a leaf tissue sample was collected from each clonal plant, DNA was isolated, and a diagnostic PCR-based assay was performed to detect the presence/absence of the morphogenic gene expression cassette to determine the number of transgenic plants in response to treatments using each different morphogenic gene expression cassette. Additionally, isolated DNA was used for genotyping using a PCR-based genetic marker assay.

[0244] The genotypic data was used to determine allelic states inherited at genome-wide marker loci. The genotypic data was used to create a dendrogram representing the genetic distance between and within clonally-derived groups, or “clone sets”, whereby genetic distance measured using allelic scores per assay states were graphically plotted to represent relatedness. Within clone sets, inheritance patterns of allelic states were also examined using ideograms displaying the inheritance of parental alleles across the physical map of the ten (10) maize chromosomes.

[0245] Transformation levels were determined by computing the number of plants testing positive for the presence of sequences of the morphogenic gene expression cassette relative to the total number of sampled plants (transgenic %) with the results shown in Table 16.

[0246] The results for the positive control treatment using (PHP88158 (SEQ ID NO: 182)) exhibited a low percentage of plants. Two percent (2%) of the regenerated plants, tested positive for the presence of the morphogenic gene expression cassette. The results for clonal plants using morphogenic protein variants including the WUSCHEL-GALLS (GS^{C27}) translational fusion (RV022819 (SEQ ID NO: 187)) and the WUSCHEL-virF^{C127} translational fusion (RV022820 (SEQ ID NO: 188)) showed relatively higher levels of regenerated plants, ranging from 9 to 47% of the clonal plants testing positive for the presence of the morphogenic gene expression cassette.

[0247] The results for the treatment using RV020636 (SEQ ID NO: 186) showed that use of an altered expression maize element (3×EME) in the ZmPLTP regulatory sequence operably linked to the WUS gene in the morphogenic gene expression cassette encoding the original WUSCHEL peptide improved the regeneration of non-transgenic, wild type haploid plants. Here, for 269 tested plant tissues, no plants tested positive for the morphogenic gene expression cassette indicating an improved utility for generating wild type haploid plants.

TABLE 16
Percentage of clonal haploid plants with
or without a morphogenic gene T-DNA

| “Altruism” Agrobacterium Strain | Transgenic/Total | Transgenic (%) |
|---|---|---|
| (PHP88158 (SEQ ID NO: 182)) | 3/136 | 2% |
| (3XENH-WUS control) | | |
| RV020636 (SEQ ID NO: 186) | 0/269 | 0% |
| (3XENH-3XEME-WUS) | | |
| RV022819 (SEQ ID NO: 187) | 29/336 | 9% |
| (WUS-GALLS^{C27} fusion) | | |
| RV022820 (SEQ ID NO: 188) | 119/252 | 47% |
| (WUS-virF^{C127} fusion) | | |

[0248] The distribution of clonal plants produced per haploid explant treated using RV020636 (SEQ ID NO: 186) was determined. On average, 4.85 clonal plants per treated haploid embryo was observed after treating 220 haploid embryos (See FIG. 1). Given these results, Agrobacterium with the RV020636 plasmid (SEQ ID NO: 186) was identified as the preferential treatment method for obtaining clonal production of wild type, non-transgenic haploid plants.

[0249] Genotyping assay results for 253 sampled clonal individuals originating from 77 RV020636-treated haploid embryos scored using over 7000 genetic marker loci demonstrated 92% (233 of 253) of the genotyped samples had equal to or greater than 99% genetic identity within clone groups. A clustering of clone sets was observed when genetic relatedness was computed and graphically represented using a dendrogram, showing that these clones were stably produced with highly similar genomes (data not shown). Within clone sets, inheritance patterns of allelic states displaying the inheritance of parental alleles across the physical map of the ten (10) maize chromosomes confirmed the utility of this method for obtaining clonal plants per treated maize haploid embryo (data not shown).

[0250] These experiments identified that particular “Altruism” plasmids exhibited variation in producing either wild type or transgenic plants (see Table 16). Plasmid RV020636 (SEQ ID NO: 186) was identified as an exemplary “Altruism” plasmid for creating a population of non-transgenic, wild type haploid plants, which upon doubling, as described in Example 6, maximizes the number of selectable individuals created in a given doubled haploid (DH) population. These methods were used to improve the effective population size of a breeding population.

### Example 6: Generating Clonal Doubled Haploid Maize Plants

[0251] Approximately 8-72 hours after performing the RV020636 transformation method using a morphogenic developmental protein, described in Example 5, treated haploid embryos were transferred onto a medium with a chromosome doubling agent, colchicine, and placed into a dark tissue culture room (28° C.). The amount of colchicine used in medium is generally 0.01%-0.2% (400-600 mg/L). Specifically, 0.05% (500 mg/L) colchicine was used in these experiments. After 8-72 hours of chromosome doubling treatment, the treated embryos were transferred and cultured using media without a chromosome doubling agent, for example to maturation medium (289Q medium).

[0252] Using the methods disclosed herein, over 60% of haploid embryos successfully responded to the colchicine doubling agent compared to 20-25% (data not shown) previously reported in the literature. In addition, the propagation of chromosome-doubled, clonal haploid maize embryos resulted in an improved success rate of self-fertilization (fertile). In these experiments, 51 clone sets, each comprising two clonal, first generation (DO) plants, were grown using standard greenhouse conditions. Reproductive success was defined as an individual's production of seed, the D1 seed, after self-fertilization of each plant. As shown in Table 17, over 60% of the diploidized haploid embryos were successfully self-fertilized (fertile) compared to 8-10% (data not shown) previously reported in the literature. Table 17 also provides reproductive fitness scores for these 51 DH clone sets.

TABLE 17
Reproductive success of first generation
(D0) clonal doubled haploids

| Fitness Description | Count | Percentage (%) |
|---|---|---|
| Male Sterile + Female Sterile | 2 | 4 |
| Male Sterile + Asynchronous Flowering | 2 | 4 |
| Female Sterile + Asynchronous Flowering | 1 | 2 |
| Asynchronous Flowering | 2 | 4 |
| Asynchronous Flowering + No Seed Set | 1 | 2 |
| No Seed Set + Male Sterile | 1 | 2 |
| Male Sterile + Runt | 1 | 2 |
| Female Sterile | 1 | 2 |
| Runt | 1 | 2 |
| Pollination unknown | 1 | 2 |
| Fertile | 38 | 75 |
| Total Events | 51 | 100 |

[0253] Given these results, it is expected that the methods of the present disclosure will provide further improvements in productivity by increasing reproductive successes, for example, by performing cross-fertilizations within clone sets when the clones reproductively complement one another. Additionally, Female Sterile, Male Sterile+Runt, and Asynchronous Flowering phenotypes which together represent in Table 17 a cumulative 14% of the observed phenotypes can likewise be used to improve productivity by further increasing reproductive successes. For example, if multiple clones are grown and such clones can reproductively complement each other, then this result indicates that within a clone set, cross fertilization between clones can further improve productivity (the production of seed) with levels up to 84% success in propagating the next generation of seed for a DH line. This result is an improvement in comparison to results of only up to 10% as previously reported.

[0254] While these DO plants were being grown, it was noted that many clone sets exhibited uniformity of morphological phenotypes within a set, including characteristics such as plant height, leaf margin width, ear height, tassel emergence, shoot emergence and silk emergence (data not shown). In contrast, as reported in the art chromosome doubling treatments with colchicine produce negative pleiotropic effects within clone sets. In addition to observing uniform phenotypes within clone sets, it was also observed using the present methods that there was morphological variation between clone sets in a manner consistent with the expected variation of a genetically diverse population of segregant F2 generation plants. These results show that the methods of the present disclosure provided additional improvements in comparison to current methods practiced in the art.

### Example 7: Selecting Clonal Doubled Haploids with Optimal Genomic Estimated Breeding Values

[0255] The following experiments demonstrate a method comprising genotyping cells derived from a clonal explant to identify, select, and propagate desirable clonal DH lines for breeding efforts.

[0256] Genomic selection methods estimate the effects of genome-wide molecular markers to calculate genomic estimated breeding values (GEBVs) for individuals without phenotypes. For example, GEBV can be used as a selection criterion by predicting phenotypic performance using genetic marker data that measure allelic states at genome-wide loci. By sampling a DH line tissue, isolating DNA from the tissue sample, and genotyping each sample as described in Example 5, it is possible to determine allelic inhertiance patterns at genome-wide loci for computing a GEBV per DH line.

[0257] Breeding programs typically use DH populations of a certain size determined in part by constraints on available breeding resources, such as limited land area available for growing plants. As described in Example 6, one problem in the current state of the art is productivity losses during DH production, for example, with losses typically up to or exceeding two-thirds of all sampled haploid embryos. One additional negative consequence caused by this attrition is the increased cost for genotyping all sampled haploid embryos and the risk that these genotyped samples will fail to develop into fertile plants. Hence, in the current state of the art, genotyping is typically performed in the subsequent generation—a process that includes the cost of goods for generating the entire DH population.

[0258] As demonstrated in Example 6 where one section of the treated explant was used for DNA isolation and used to characterize the presence/absence of a T-DNA while other sections were used to obtain a clone set per treated haploid embryo, it is expected that such DNA can be used to obtain genetic data for computing a GEBV per DH line, ideally before growing the DH plants to maturity.

[0259] For example, a breeding cross was created using the methods as described in Example 4 and the population of treated haploid embryos was genotyped (data not shown). The genetic data set was used to calculate GEBVs for each treated haploid embryo being propogated, specifically GEBVs for moisture, yield, plant height, and ear height. The resulting GEBVs were graphed as histogram distributions for each trait, with the count of DH lines shown in response to the predicted phenotypic values per trait. FIGS. 2A-2D show these histogram distributions of genetic estimated breeding values (GEBVs). Histogram distribution for the count of DH lines (y axis) in response to estimated breeding values (x axis) show phenotypic predictions for grain moisture (FIG. 2A), grain yield (FIG. 2B), plant height (FIG. 2C) and ear height (FIG. 2D). As a result, using the methods of the present disclosure, it is shown how doubled haploid populations can be characterized using GEBVs, thereby facilitating selection for further plant breeding based on GEBVs.

[0260] In the method of the current example, DNA extracted from sampled cells was used for genetic marker analyses. In another aspect, it is understood that sampled cells can also be characterized using other methods, including but not limited to extraction of RNA, proteins, chromatin, and or metabolites.

[0261] It is expected that enriched DH populations based on such selections using the methods of the present disclosure will phenotypically outperform a randomly generated population. Thus, the methods disclosed herein are expected to favorably impact the rate of genetic gain in a breeding program. In addition, the methods disclosed herein can reduce input costs when using GEBVs as a selection criterion earlier in the DH production process, thereby improving productivity of breeding programs.

### Example 8: Generating Artificial Seed

[0262] The following experiments demonstrate clonally propagated somatic embryos created using the methods described herein are useful for creating artificial seed, for example artificial seed using clonal somatic embryos derived from an F1 hybrid cross.

[0263] F1 hybrid embryos are produced by crossing two inbred parental lines where one parent is the female parent (ear donor) and the second parent the male parent (pollen donor). The two plant varieties can be cross fertilized in a manner that prevents any outcrossing to generate F1 hybrid embryos. When the two parents are each homozygous at all loci genome wide, it is expected that the resultant embryo will be heterozygous at all loci genome-wide. The methods of the present disclosure collect an immature F1 hybrid embryo for treatment as described below.

[0264] Using methods as described above to treat an F1 embryo, it is expected clonal somatic embryos will be produced. The clonal somatic embryos can be cultured to completion of the morphogenesis phase. The mature clonal somatic embryos can then be separated in a manner allowing each clonal somatic embryo to be collected. An isolated clonal somatic embryo may be further treated using in vitro tissue culture methods to promote somatic embryo maturation resulting in the induction of seed dormancy, a quiescent state allowing somatic embryos to survive periods unfavorable for seedling germination.

[0265] For example, methods for producing a mature embryo can include enhancing development of the proembryo into an embryo by promoting cleavage of proembryo cells using a modified basal medium containing a plant growth regulator selected from the group consisting of auxins, cytokinins, cyclitols and a mixture thereof.

[0266] Sub-culturing a developed embryo on a modified medium containing abscisic acid and a reduced concentration of plant regulators in darkness or in a weak diffused light for 1-8 weeks inhibits further proembryogenesis. Sub-culturing the embryo on a modified basal medium in continuous light for about 7 to 8 weeks generates elongated somatic embryos. Converting elongated somatic embryos into mature embryos is performed by further culturing the elongated embryos on a modified basal medium and recovering the mature embryo.

[0267] Artificial seed is made using methods comprising encapsulating a mature somatic embryo with nutritive and protective layers to allow germination under favorable conditions like a natural seed. It is expected that the artificial seed will protect the somatic embryo from mechanical damage during manipulation and transport, as well as provide nutritive support for germination of the somatic embryo to allow plant growth and development after sowing.

### Example 9: Generating Clonal Doubled Haploids with a Targeted Genome Modification

[0268] The following experiments demonstrated the stimulation of somatic embryogenesis in a plant cell by the expression of WUS2 protein in a plant cell wherein the plant cell stimulated to undergo somatic embryogenesis is not the plant cell expressing the WUS2 protein. In this method, the plant cell stimulated to undergo somatic embryogenesis is a second plant cell wherein the WUS2 protein activity is provided by a first plant cell that expresses a first T-DNA, for example from the plasmid RV020636 (SEQ ID NO: 186) (morphogenic gene expression cassette) as described in Example 5. The second plant cell is simultaneously provided a T-DNA from a second Agrobacterium. The second T-DNA provided by the second Agrobacterium contains a genome modification expression cassette, thereby allowing recovery of a genome-modified, double haploid clone set. These plant cells were genome modified while containing no T-DNA from the morphogenic gene expression cassette(s).

[0269] Specifically, immature haploid embryos of a maize F1 hybrid crossed with a haploid inducer as described in Example 4 were transformed using Agrobacterium strain LBA4404 THY− (See U.S. Pat. No. 8,334,429 incorporated herein by reference in its entirety) as described in Example 3.

### A.) In Vitro Gene Editing and Clonal Doubled Haploid Production Using Plasmids RV020636 (SEQ ID NO: 186) and RV006010 (SEQ ID NO: 189)

[0270] A first Agrobacterium strain comprising plasmid RV020636 (SEQ ID NO: 186) was used as described in Example 5 and mixed with a second Agrobacterium strain comprising plasmid RV006010 (SEQ ID NO: 189). The Agrobacterium mixture contained a ratio of 95% of the Agrobacterium strain comprising plasmid RV006010 plasmid (SEQ ID NO: 189)+5% of the Agrobacterium strain comprising plasmid RV020636 (SEQ ID NO: 186). The Agrobacterium mixture was used to transform haploid embryos. The RV006010 T-DNA (SEQ ID NO: 189) contains a polynucleotide expressing a functional Cas9 protein, two gRNAs for cleaving two target sites at ZM-NAC7 (SEQ ID NO: 343), an embryo-expressed cyan fluorescent protein, a neomycin phosphotransferase II (nptII) gene conferring resistance to the kanamycin, and a maize-optimized Cre recombinase. In this construct, Cre activity excised the T-DNA polynucleotide sequence encoding the Cas9 protein, two gRNAs, and the Cre recombinase coding sequences resulting in a T-DNA conferring a cyan color marker and kanamycin resistance.

[0271] Following the methods as described in this Example 9 and in Examples 5 and 6, sixteen (16) clone sets were potted in soil, wherein each clone set comprised four clonal plants per treated haploid embryo. Plants surviving transplanting to soil were used for leaf tissue sampling.

[0272] After plantlet regeneration as described in Example 6, leaf tissue was sampled and the ZM-NAC7 target site (SEQ ID NO: 343) was sequenced for evidence Cas-mediated gene editing.

[0273] When haploid embryos were co-infected with this Agrobacterium mixture and diploidized as described in Example 6, eighty-nine (89) DO/TO plants were regenerated from a total of twenty-one (21) clone sets each clone set having one or more clonal plants produced per treated haploid embryo. Each plant was tested for copy numbers of the RV020636 (SEQ ID NO: 186) and RV006010 (SEQ ID NO: 189) T-DNA.

[0274] A clone set comprising four (4) clonal doubled haploid plants was identified containing only a single copy of the RV006010 T-DNA (genome modification expression cassette) with no integration of the WUS-containing T-DNA (RV020636).

[0275] Sequencing analysis at the ZM-NAC7 target site (SEQ ID NO: 343) for the 4 clonal plants (4.6%) indicated gene editing activity at the target site as evidenced by a spectrum of minimally SDN-1 mutations present within each sampled plant (see Table 18). Three of the four plants exhibited evidence for both gRNAs being recruited to the target site, as evidenced by either an inversion of the DNA sequence between the two gRNA target sites or as indicated by the deletion of the DNA sequence between the two gRNA target sites, herein called a “dropout”, likely repaired by a non-homologous end joining (NHEJ) mechanism (see Table 18). The two clonal plants with mutated alleles indicated that a functional Cas9-rRNA ribonucleoprotein complex modified the DNA at the target site using this method.

[0276] It is expected that certain mutations will be transmitted via the germline into the next generation, making this useful for obtaining a genome-modified, double haploid clone set lacking a T-DNA with a morphogenic expression cassette(s).

### B.) In Vitro Gene Editing and Clonal Doubled Haploid Production Using Plasmids RV022820 (SEQ ID NO: 188) and RV006010 (SEQ ID NO: 189)

[0277] As show in in Table 16, Agrobacterium strains comprising different plasmids affected both the induction of somatic embryos and the frequency of regenerated plants that had T-DNA with a morphogenic gene expression cassette(s). These results showed that a stronger regulatory element (e.g. enhancement due to the presence of 3×EME sequences within the promoter) such as that found in plasmid RV020636 (SEQ ID NO: 186) T-DNA increased the total number of clonal plants generated and reduced the frequencies of the plants having a stably incorporated morphogenic gene expression cassette T-DNA insertion. Alternatively, as shown in Table 16, Agrobacterium strains comprising plasmids with expression cassettes encoding WUS fusion proteins (e.g. RV022819 (SEQ ID NO: 187) and RV022820 (SEQ ID NO: 188)) increased the total number of clonal plants generated and increased the frequencies of the plants having a stable morphogenic gene expression cassette T-DNA insertion.

[0278] Further experiments were conducted to examine how a plasmid other than RV020636 (SEQ ID NO: 186) affected recovery of clonal doubled haploid plants containing the desired gene edit provided by plasmid RV006010 T-DNA (SEQ ID NO: 189) comprising the Cas9-mediated “trait” required for gene editing at the ZM-NAC7 genomic target site (SEQ ID NO: 343). In this experiment, RV022820 (SEQ ID NO: 188) was used to stimulate somatic embryogenesis, rather than RV020636 (SEQ ID NO: 186). The RV022820 T-DNA (SEQ ID NO: 188) comprises a polynucleotide encoding a WUS-virF^{C127} fusion operably linked to the enhancer-modified ZmPLTP promoter. Specifically, a first Agrobacterium strain comprising plasmid RV022820 (SEQ ID NO: 188) was used as described in Example 5 and mixed with a second Agrobacterium strain comprising plasmid RV006010 (SEQ ID NO: 189). The Agrobacterium mixture contained a ratio of 95% of the Agrobacterium strain comprising plasmid RV006010 (SEQ ID NO: 189)+5% of the Agrobacterium strain comprising plasmid RV022820 (SEQ ID NO: 188).

[0279] Following the methods as described in this Example 9 and in Examples 5 and 6, thirteen (13) clone sets were potted in soil, wherein each clone set comprised two clonal plants per treated haploid embryo. Twenty-three plants survived transplanting to soil and leaf tissue was sampled. DNA was isolated and diagnostic assays were performed to first test for the presence/absence of the T-DNA derived from the RV022820 plasmid (SEQ ID NO: 188) comprising the morphogenic gene cassette used to stimulate somatic embryogenesis (clonal propagation treatment). Individuals scored as absent for plasmid RV022820 T-DNA were advanced for sequencing analysis at the target site, ZM-NAC7 (SEQ ID NO: 343), for evidence of gene editing.

[0280] Of the twenty three (23) plants sampled for sequencing after being potted in soil, each plant was scored as lacking the RV022820 T-DNA comprising the morphogenic gene cassette used to stimulate somatic embryogenesis and were thus considered clonal DO plants capable of having been genome modified. The resulting sequence analysis at the ZM-NAC7 genomic target site (SEQ ID NO: 343) showed evidence of gene editing in two (2) clone sets (four (4) plants total; 17.4%) and in this result no evidence of any deletion “dropouts” were observed as reported in Table 18.

[0281] In the first clone set, consisting of two plants derived from one haploid embryo, the analysis showed that the two plants had the same mutation at the Cas9 target site and both plants were scored as having a stable RV006010 T-DNA integration.

[0282] In the second clone set, consisting of two (2) plants derived from one haploid embryo, the analysis showed that the two plants were mutated at the Cas9 target site, with each plant having a different mutation. In this clone set however, one plant was characterized as having a stable RV006010 T-DNA integration event, while the second plant was scored as lacking stable integration of the RV006010 T-DNA. This result showed that the in-vitro treatment used herein produced a genome-modified plant without stable integration of the RV006010 T-DNA encoding the gene modification trait. While not wishing to be bound by any one theory it is believed that such a result was achieved from transient expression of the T-DNA, thereby producing a mutation at the genomic target site. Regeneration of a plant with such a gene edit was notably achieved with no detection of the WUS-containing T-DNA (RV022820), and thus was stimulated after being contacted by WUS protein activity. This resulted in obtaining a gene-edited DO plant derived from a plant cell that had never been stably transformed with a foreign DNA.

[0283] It is expected that certain mutations will be transmitted via the germline into the next generation, and are useful for obtaining a genome-modified, double haploid clone set lacking a T-DNA with a morphogenic expression cassette(s). Given a DO plant was derived from a plant cell having been transiently contacted by only the WUS protein, Cas9 protein and gRNA(s) provided to a plant cell, the method of the present disclosure obtained a genome-modified doubled haploid plant wherein that plant per se was obtained without the process of introducing a polynucleotide into the genome of the plant.

### C.) In Vitro Gene Editing and Clonal Doubled Haploid Production Using Plasmids RV020636 (SEQ ID NO: 186) and RV036376 (SEQ ID NO: 317)

[0284] As described in section A.) and section B.) of this Example 9, methods for obtaining clonal doubled haploid plants having a targeted genome modification were described and clonal doubled haploid plants having a targeted genome modification were obtained. Additional experiments were performed to further improve this capability by further stimulating embryogenesis and the propagation of clonal plants having a targeted genome modification.

[0285] For this purpose, plasmid RV036376 (SEQ ID NO: 317) was constructed. Briefly, the T-DNA of the RV036376 plasmid (SEQ ID NO: 317) has the same gene editing components as used in the RV006010 plasmid (SEQ ID NO: 189), but plasmid RV036376 (SEQ ID NO: 317) also comprises a polynucleotide encoding a full-length BBM/ODP2 peptide operably linked to the Z. mays PLTP promoter and lacks the cyan fluorescent protein related sequences. In this construct, Cre activity excised the T-DNA polynucleotide sequence encoding the Cas9 protein, two gRNAs, Cre recombinase, and the BBM/ODP2, and resulted in a T-DNA conferring only kanamycin resistance.

[0286] Embryos were treated as described in this Example 9. Specifically, a first Agrobacterium strain comprising plasmid RV020636 (SEQ ID NO: 186) was used as described in Example 5 and mixed with a second Agrobacterium strain comprising plasmid RV036376 (SEQ ID NO: 317). The embryos were treated with the Agrobacterium mixture containing a ratio of 95% of the Agrobacterium strain comprising plasmid RV036376 (SEQ ID NO: 317)+5% of the Agrobacterium strain comprising plasmid RV020636 (SEQ ID NO: 186).

[0287] When co-infecting a plant cell with an Agrobacterium comprising plasmid RV036376, co-expression of the BBM/ODP2 peptide along with the expected ribonucleotide protein complex (RNP) activity improved the propagation of clonal plants having Cas9-mediated gene editing at the ZM-NAC7 genomic target site (SEQ ID NO: 343). Specifically, the combined protein activity of simultaneously provided WUSCHEL and BABYBOOM/ODP2 to a plant cell improved the propagation of clonally-derived embryos into regenerated plants and the edited frequency of those regenerated plants.

[0288] In another aspect, it is expected that other such proteins useful in the present disclosure include, but are not limited to, other morphogenic genes, such as LEC1 and/or a geminivirus RepA gene as well as, other morphogenic genes disclosed herein.

[0289] Following the methods as described in this Example 9, 16 clonal sets were potted in soil with each clone set comprising six clonal plants per treated haploid embryo (total of 96 plants). From these plants, leaf tissue samples are collected, DNA is isolated, and diagnostic assays are performed to first test for the presence/absence of the T-DNA derived from the RV020636 plasmid (SEQ ID NO: 186). Individuals scored as absent for RV020636 T-DNA are advanced for sequencing analysis at the target site for evidence of gene editing.

[0290] The resulting plants can be used for intra-clonal cross-breeding, for example in the methods of obtaining plants for recovery of an allelic series as described below.

[0291] The experimental results of section A.) and B.) described obtaining clonal doubled haploid plants containing a targeted genome modification. Specifically, the plant cell in the above methods was treated with a first T-DNA from a first Agrobacterium that provided only the WUS2 protein activity, thereby stimulating somatic embryogenesis, while a second T-DNA from a second Agrobacterium provided to the plant cell conferred genome modification capabilities. Gene-edited DO plants derived from a maternal maize haploid cell were observed at a relatively low rate, for example with approximately 3% to 17% of the DO plants had a target site mutation (see section A.) and B.) above).

[0292] In contrast to the above results in section A.) and B.) above, the results here show that the ability to regenerate clonal doubled haploid plants containing a targeted genome modification was further improved using Agrobacterium comprising plasmid RV036376, wherein the second T-DNA from the RV036376 plasmid conferred both genome modification capabilities and morphogenic gene expression of the BBM/ODP2 peptide.

[0293] Sixteen (16) clone sets were generated after treatment with a first Agrobacterium strain comprising plasmid RV020636 (SEQ ID NO: 186) mixed with a second Agrobacterium strain comprising plasmid RV036376 (SEQ ID NO: 317). For the sixteen (16) clone sets generated, each clone set had six (6) plants per treated embryo, a total of 83 plants were regenerated, transplanted, and had leaf tissue sampled. Isolated DNA used for sequencing analysis at the target site showed that 40 of these 83 plants were Cas9-mediated gene edited (40 of 83, 48.2%) and notably thirteen (13) of those 40 plants contained mutations corresponding to gene-edited SDN-2 “dropout” mutations (see Table 18).

TABLE 18

| Treatment | Clone | Total D0 | Sequenced | SDN-1 edit | SDN-2 edit |
|---|---|---|---|---|---|
| Method | Sets | plants | D0 plants | (% sequenced D0) | (% sequenced D0) |
| RV020636 | 21 | 89 | 87 | 4 (4.4%) | 3 (3.4%) |
| (SEQ ID NO: 186) | | | | | |
| and RV006010 | | | | | |
| (SEQ ID NO: 189) | | | | | |
| RV022820 | 6 | 26 | 23 | 4 (17.4%) | 0 (0%) |
| (SEQ ID NO: 188) | | | | | |
| and RV006010 | | | | | |
| (SEQ ID NO: 189) | | | | | |
| RV020636 | 16 | 96 | 83 | 40 (48.2%) | 13 (15.7%) |
| (SEQ ID NO: 186) | | | | | |
| and RV036376 | | | | | |
| (SEQ ID NO: 317) | | | | | |

[0294] Thus, the results demonstrated that using plasmid RV036376 improved not only clonal propagation per se, but also improved the ability to obtain clonal doubled haploid plants having a targeted genome modification. It is expected that the mutations will be transmitted via the germline into the next generation of plants providing a genome-modified, double haploid clone set lacking a T-DNA with a morphogenic gene expression cassette(s).

[0295] It is also expected that co-expression of other such morphogenic genes, or any gene product useful for promoting embryogenesis can be used in the manner described herein to improve both clonal propagation per se, as well as the recovery of genome-modified plants lacking T-DNA integration.

[0296] The results obtained using the methods of the present disclosure demonstrated a method for obtaining genome-modified doubled haploid plants. The present methods provided a notable improvement over methods previously reported in the literature. For example, as previously reported, a method of editing a haploid progeny using a pollen from a haploid inducer plant, wherein the inducer expresses a DNA modification enzymye and optionally at least one guide RNA, the capability for a transformed haploid inducer line to cause modifications at a target site in maize haploid progeny ranged from 4.7% to 8.8% and no results other than SDN-1 mutations were reported. In contrast, using the methods described herein provided significant improvements in gene editing efficiency and the range of edits obtained.

[0297] The methods disclosed herein for haploid induction editing technology (HI-edit) is useful in plant breeding methods and enables direct editing of elite inbred lines by a single cross. Using the methods of the present disclosure in a breeding program saves in labor costs and time because the present methods do not require the evaluation and selection of new events per construct per genome modification target each time a new genome modification is introduced into an elite breeding line or breeding population.

[0298] The methods disclosed herein not only improve gene-editing efficiencies, for example both SDN-1 and SDN-2 mutations were achieved at greater efficiencies than previously reported in the art, the methods of the present disclosure also unexpectedly provided a genome-modified plant lacking any stably transformed foreign DNA. The methods of the present disclosure provided these results in relatively less time, with much greater agility, and with suitable scalability for meeting the unsolved needs of plant breeding programs to continue improving the phenotypic performance of elite germplasm than methods previously reported in the art.

### D.) Clone Selection, Clonal Propagation and Allelic Series Recovery

[0299] It is expected that each hemizygous, single copy plant will have the T-DNA (such as those T-DNAs described above) inserted at a random position in the genome. Additionally, it is expected that expression of the gene editing trait encoded in the “Trait” T-DNA (such as those T-DNAs described above) will express a ribonucleotide complex comprising a site directed nuclease and gRNA to create specific, targeted changes at the nuclease target site. For example, expressing a gRNA complexing with a CAS9 nuclease can cause a site directed mutation. Further, mutagenesis in a series of cells can result in a series of allelic mutation sets, wherein each individual derived from a cell can have a particular mutation.

[0300] Within a clone set, this method allows identifying and selecting individuals to cross fertilize, thereby creating an F1 hybrid within a clone set, wherein the F1 hybrid genome is expected to identical and homozygous genome-wide, except for: i) possible T-DNA integration sites that are hemizygous for the T-DNA, for example having the “Trait” T-DNA integrated at two independent loci inherited from the two clonal siblings used as parental lines, and ii) the genome will be heterozygous for two germline heritable mutations at the CRIPSP-CAS9 target site, wherein each site directed mutation is originally derived from a unique mutation event.

[0301] Thus, by self-fertilization of such an F1 genome and by growing the seed of this plant, the progeny in the next generation can be analyzed and segregant progeny inheriting wild type alleles in respect to T-DNA insertion sites can be selected. Amongst these individuals, genetic analysis of the inherited mutations at the target site allows identifying and selecting individuals homozygous for a heritable germline mutation. On average, it is expected such mutations will be segregating 1:2:1 with respect to the two heritable germline mutations. Recovery of the two respective homozygous classes thus allows obtaining clonal doubled haploid plants with a pair of allelic series of mutations that are useful for plant breeding purposes.

[0302] Repeating this process with additional clonal lines from within one clone set can be performed to expand the number of clonal lines that are each homozygous for an independent mutant allele at the nuclease target site.

[0303] The methods described here allow generating an allelic series of mutations within a clone set of a doubled haploid line.

[0304] In one aspect, the methods of the present disclosure allow for sampling and sequence verification of a modification at the target site prior to flowering, thus, providing the option to screen, select, and cross selected plants in a controlled manner. For example, within a clone set, here referred to as “intra-clonal cross-breeding”, it is expected any randomly inserted T-DNA integration sites can be selected against in progeny produced from an intra-clonal F1 cross. It is expected that diagnostic assays for detecting T-DNA can achieve the identification of progeny that have inherited only wild type alleles in respect to parental T-DNA integration sites that become hemizygous in the intra-clonal F1 cross.

[0305] A second purpose for intra-clonal cross-breeding is the expectation that a gene edit can be fixed to homozygosiy upon self-fertilization of the progeny having only wild type alleles in respect to parental T-DNA integration sites. In this manner, intra-clonal cross-breeding can provide an allelic series of mutations within a clone set.

[0306] This method offers a clear benefit for trait integration. For example, back-crossing of a trait locus is commonly used and that method requires first creating the edit in a transformable maize line. After that line is created, that line is then used as a “donor” parent, during a series of back-crossing to a recipient line, used as a “recurrent” parent. The purpose of back-crossing is to achieve recovery of the recurrent parent genome with only the introgression of the gene-modified target site locus from the “donor” parent. In comparison to the present disclosure, conventional back-crossing methods are more labor intensive and require more breeding time, notably as the number of parental conversions increases, for example, in comparison to an effort to introgress desired mutations into each doubled haploid line within a population as described herein.

[0307] Thus, the method described here presents a novel method for “forward” breeding of a gene-modified trait at the population level.

[0308] From a quantitative genetics perspective, the ability to derive an allelic series of mutations at a target site achieves other useful advantages for studying causal genotype-to-phenotype relationships. First, an allelic series within a clone set provides one level of genetic analysis that can be performed. Second, multiple allelic series for multiple clone sets comprises a second level of genetic analysis across a breeding poulation, or alternatively a multitude of populations, that can be performed.

[0309] Together, these results are expected to support novel plant breeding methods that are an improvement to the state of the art.

### Example 10: Generating Maize Clonal Doubled Haploids Using Homology-Directed Repair (HDR)

[0310] The following experiments demonstrate using a gene targeting system comprising double strand breaks (DSB) at a site-specific genomic target site, or region, and homology directed repair (HDR) to facilitate directional integration of a desired nucleotide sequence into corresponding homologous recombination sites of a haploid plant genome.

[0311] Immature haploid embryos of a maize F1 hybrid crossed with a haploid inducer as described in Example 4 were transformed with Agrobacterium strain LBA4404 THY− (See U.S. Pat. No. 8,334,429 incorporated herein by reference in its entirety) as described in Example 3.

[0312] A first Agrobacterium strain comprising plasmid RV020636 (SEQ ID NO: 186) was used as described in Example 5 and mixed with a second Agrobacterium strain comprising plasmid RV006010 (SEQ ID NO: 189). The Agrobacterium mixture contained a ratio of 95% of the Agrobacterium strain comprising plasmid RV006010 plasmid (SEQ ID NO: 189)+5% of the Agrobacterium strain comprising plasmid RV020636 (SEQ ID NO: 186). In this experiment, Agrobacterium transformation methods are practiced as described in Example 3 as part of a mixture with another Agrobacterium, here containing a gene targeting plasmid with a T-DNA comprised of multiple “Traits” (for example a zinc finger nuclease, a donor excision template encoding a trait gene, and an anthocyanin color marker, see Table 9).

[0313] For treatment, Agrobacterium strains are mixed at a ratio of 95% Trait-containing plasmid (for example, PHP91522 (SEQ ID NO: 190) or PHP90308 (SEQ ID NO: 191)) to 5% WUS-containing plasmid (RV020636 (SEQ ID NO: 186), see Table 9). When haploid embryos are co-infected with this Agrobacterium mixture, transgenic TO plants containing only a single copy of the “Trait” T-DNA (PHP91522 or PHP90308) with no integration of the WUS-containing T-DNA (RV020636) are regenerated. Upon expression of the Trait T-DNA (PHP91522 or PHP90308), activity of the enhanced zinc finger nuclease (EZFN) will excise the donor template encoded in the “Trait” T-DNA, thereby allowing homology directed repair and stable transgene integration at the targeted double strand break site.

[0314] Explants with excised donor templates can be detected using morphological detection of anthocyanins expressed by an anthocyanin regulatory protein resultant from excision of the donor template to allow gene regulation from the ZmGlob1 regulatory sequence. Stable transgenic plants are identified using positive selection, for example by identifying plants with herbicide resistance to glufosinate or haloxyfop for PHP91522 and PHP90308, respectively. It is expected that culturing such plants in the presence of a chromosome doubling agent as described in Example 6 will facilitate chromosome doubling and diploidization of the stable transgenic doubled plants.

[0315] Further, it is expected that each hemizygous, single copy plant with herbicide tolerance will have the “Trait” gene inserted at a targeted site in the genome and the remnant “Trait” T-DNA comprising the repaired T-DNA sequence inserted at a random position in the genome.

[0316] Within a clone set, this method allows identifying and selecting clonal individuals to cross fertilize, thereby creating seed of this cross that can be grown. Some progeny are expected to be wild type at loci segregating for each random T-DNA insertion site comprising the repaired “Trait” T-DNA sequence with also inheritance of alleles from both parental gametes with a successful gene targeting event at the targeted transgene integration site. Further propagation of such plants will then segregate as clonal doubled haploids with two copies of the “Trait” gene at the target site.

[0317] The methods of the present disclosure provide an improvement to the current state of the art by accelerating trait introgression using haploid induction breeding methods, thus, enabling forward breeding capabilities for site-directed transgene integration in doubled haploids without the need for backcrossing-mediated trait introgression.

### Example 11: Generating Clonal Doubled Haploids with Reduced Frequencies of Transgenic Plants

[0318] The following experiments demonstrate using a negative selection system to select against transgenic cells or resulting transgenic plants thereof, to produce non-transgenic, wild type clonal doubled haploid plants derived from maternal haploid cells.

[0319] Negative selection methods in plant cells that result in death of transformed cells are useful in the methods of the present disclosure. Conditional selection methods are useful in the methods of the present disclosure, for example substrate-dependent selection systems comprising transgenic cells expressing a gene useful for converting non-toxic agents to toxic agents that result in the death of the transformed cell. Genes used in plant cells for this purpose, include but are not limited to, the bacterial cytosine deaminase (codA) gene, that converts non-toxic 5-fluorocytosine to the toxic compound 5-fluorouracil, or the Streptomyces griseolus cytochrome P450 monooxygenase gene CYP105A1 that converts non-toxic sulfonyl urea pro-herbicide R7402 to a phytotoxic agent are useful in the methods of the present disclosure. Of interest is the ability to first culture a treated explant in a growth medium without such a non-toxic agent thereby allowing growth of both transformed and non-transformed cells followed by transfer to a growth medium with such a non-toxic agent thereby promoting selection against the transformed cells and the resulting growth of non-transformed cells.

[0320] In the methods of the present disclosure a gene conferring conditional negative selection, for example the bacterial cytosine deaminase (codA) gene is cloned into a plasmid. Transformation is carried out as described above using the same steps through maize transformation and chromosome doubling followed by transfer of such embryos to a maturation medium with selection, for example the 289Q medium supplemented with 5-fluorocytosine. Alternatively, conditional selection methods can also be practiced during or after proliferating callus tissue of each treated haploid embryo is dissected. For example, by transferring each portion of dissected tissue being transferred to maturation medium (289Q) supplemented with 5-fluorocytosine and cultured at 26-28° C. under dark conditions.

[0321] It is expected that transfer to growth medium supplemented with a non-toxic agent will promote selection against transformed cells and resulting growth of non-transformed cells, thereby facilitating the creation of clonal doubled haploid populations with reduced frequencies of transgenic plants and elevated frequencies of non-transgenic, wild type plants.

### Example 12: Generating Clonal Doubled Haploids from a Responsive Microspore-Derived Cell

[0322] The following experiments demonstrated using a negative selection system to select against transgenic cells or resulting transgenic plants thereof, to produce non-transgenic, wild type clonal doubled haploid plants derived from paternal haploid cells.

[0323] In this method, embryogenic growth was stimulated in non-transformed cells, and particularly in a microspore-derived cell, thus the methods of the present disclosure are useful for generating populations of microspore-derived clonal doubled haploids. Microspores were extracted, isolated, and purified from a donor tissue or organ producing such gametic cells. These cells were cultured in a growth medium to induce an embryogenic response. The methods of the present disclosure provide the generation of corn microspore-derived embryos with improved frequency of responsive microspore-derived embryos in a genotype-independent manner.

[0324] Methods of the present disclosure were practiced using ATCC40520 corn microspores (see U.S. Pat. No. 5,602,310 incorporated herein by reference in its entirety) cultured in a petri dish in a 9% sucrose induction medium at 28° C. under dark conditions for seven (7) to twenty-one (21) days, preferentially fourteen (14) days after initiating the culture. During initial phases of corn microspore embryogenesis, the cellular response results in repeated cell divisions, thereby forming multicellular structures (MCS). With continued development, a MCS grows, resulting in embryo-like structures enclosed within the original microspore wall, known as the exine, the exine then characteristically degrades to allow further development into haploid embryos and regeneration of plantlets.

[0325] MCS were transferred from a liquid culture, collected in a 70 μm Fisher brand cell strainer (fisher scientific by Thermo Fisher Scientific catalog #FBH #22-363) and washed three times with 0.75 mL of 9% sucrose induction medium. The MCS were transferred from the cell strainer to a sterile 50 mL polypropylene conical centrifuge tube (Thermo Fisher Scientific catalog #14-432-22) with MCS cells suspended in a final 2.25 mL volume of 9% sucrose induction medium.

[0326] Agrobacterium-mediated transformation of MCS cells was performed as described in Example 3, including the preparation of the Agrobacterium master plant and growth of Agrobacterium on a solid medium as described above. Two plasmids were used in the current method (See Table 9) and each bacteria was resuspended into the liquid infection medium by vortexing with an optical density of 550 nm of the Agrobacterium suspension and then adjusted to a reading of 0.5 OD. The two strains were combined in a mixture (95% PHP86491 (SEQ ID NO: 183) and 5% PHP87078 (SEQ ID NO: 181)).

[0327] The MCS and the combined Agrobacterium were combined in a suspension using 0.5 mL of the suspended MCS cells and 0.05 mL combined Agrobacterium mixture, allowed to incubate for 5 minutes under sterile conditions, transferred to a solid medium (e.g. 605J), and incubated under dark conditions at 21° C. As a negative control, 0.5 mL of the suspended MCS cells were cultured in the same manner as described but without the combined Agrobacterium mixture within the solution. After 24 hours, each plate was transferred to 28° C. and incubated under dark conditions.

[0328] The results of this experiment indicated that microspore embryogenesis was stimulated in response to the combined Agrobacterium mixture treatment with treated paternal haploid cells transferred to 605J medium without selection after 72 hours.

[0329] In another example, the methods of the present disclosure can be practiced as described above with Agrobacterium-treated MCS transferred to a solid medium with antibiotic (e.g. 605T).

[0330] In another yet another example, the method of the present disclosure can use a plasmid as shown in Table 9 that co-expresses a gene conferring conditional negative selection, for example the bacterial cytosine deaminase (codA) gene as described in Example 11. The method for transformation can be practiced as described above using the same steps through maize transformation and chromosome doubling steps and then transferring proliferating callus tissue derived from a paternal haploid cell to a maturation medium with selection, for example 289Q medium supplemented with 5-fluorocytosine. Conditional selection methods can also be practiced during or after proliferating callus tissue of each treated microspore-derived embryo is dissected. For example, by transferring each portion of dissected tissue to maturation medium (289Q) supplemented with 5-fluorocytosine and cultured at 26-28° C. under dark conditions.

### Example 13: Methods of In Vitro Plant Breeding

[0331] Meiosis is a process for forming haploid gametes from diploid germ cells, a process essential for sexually reproducing species to transmit genetic information to the next generation. Meiosis requires a specialized cell cycle consisting of one round of DNA synthesis followed by two successive rounds of M phase that reduces the number of chromosomes in the parent cell by half. After meiosis occurs, each haploid cell contains a mixture of genes inherited from the maternal and paternal genome following the principle of independent assortment. Independent assortment requires homologous pairs of chromosomes must be identified and matched, called pairing, during Meiosis I. The matched pairs must be physically interlocked by recombination, also referred to as exchange or crossing-over, resulting in meiotic recombination between two homologous chromosomes thereby producing the recombinant gametes. Methods manipulating control of a cell's regulation of mitosis-meiosis pathways are of interest to the present disclosure, specifically control of molecular mechanisms promoting a cell's commitment for entry into meiosis.

[0332] For breeding purposes, a cell containing chromosomal regions that are heterozygous can be used, wherein the desired outcome is the production of meiotic recombinant cells. The use of an F1 hybrid embryo resultant from a biparental cross is an exemplary cell type for this method. It is understood that other cell types, for example from subsequent generations or from other breeding approaches, such as backcrosses, can be generated, obtained, and used for treatment as described below.

[0333] Commitment to entry into meiosis comprises two parts: i) exit from the mitotic cell cycle and, ii) induction of the alternate meiotic cell cycle program. As described here, the former step for inducing mitotic cell cycle activity is stimulated in response to expression of a morphogenic developmental gene, for example as described in Example 5, wherein such treatments characteristically cause a relatively high mitotic activity that results in the induction of somatic embryogenesis. Although induction of the alternate meiotic cell cycle program is less well characterized, here the present disclosure describes treatments useful for controlling a cell's commitment to entry into meiosis.

[0334] Treatments useful for entry into meiosis include, but are not limited to, responses to reducing treatments that increase hypoxia and or lower cellular hydrogen peroxide levels, by either environmental or chemical means. Cell treatments providing activity of a gene product, or gene products, useful for committing entry of the cell into meiosis are also of interest.

[0335] In the current method, exposing a cell of an F1 embryo to redox-modulatory conditions is of interest.

[0336] Exposing a cell of an F1 embryo to redox-modulatory conditions comprises transfer of the treated cell to a hypoxia-inducing tissue culture system, such as use of a hypoxia incubator chamber (StemCell™ Technologies, catalog #27310) or use of oxygen-controlling biomaterials, such as hypoxia-inducible (HI) hydrogels that can provide three dimensional hypoxic microenvironments before, during, or after the induction of somatic embryogenesis. In this method, the treated cells are cultured in conditions to alter the redox potential of cells, thereby promoting acquisition of a germ cell fate upon exiting a mitotic cell cycle.

[0337] In another aspect, methods for exposing an embryo cell to redox-modulatory conditions include treatment of a F1 hybrid embryo by contacting the cell of a F1 hybrid diploid embryo with chemical treatments before, during, or after the induction of somatic embryogenesis to manipulate cellular redox conditions, thereby promoting acquisition of a germ cell fate.

[0338] For example, the chemical treatment can be in the form of a gas, liquid, or solid, including, but not limited to, a redox-modulatory compound dissolved in a liquid or as a particle present in a liquid. A chemical treatment useful for promoting acquisition of a germ cell fate includes contacting the cell with a potassium iodide solution (KI, 10 mM) for up to 48 hours. Another chemical treatment useful for promoting acquisition of a germ cell fate includes contacting the cell with sodium nitroprusside (SNP, 20 pM), as well as a SNP chemical treatment while under hypoxic atmosphere conditions achieved by administering gases, such nitrogen gas (N₂) and or carbon dioxide (CO₂), for example to atmospheric levels less than 19.5 percent oxygen. In response to such treatment, the treated cell is thereby cultured with an altered acquisition of germ cell fate.

[0339] In another aspect, it is believed that meiosis-specific gene products can alter control of a cell's commitment to entry into meiosis. Thus, methods for contacting the cells with a gene, or genes, conferring functional activity for committing entry of the cell into meiosis are of interest. Such genes useful in the present method include but are not limited to ectopic expression and biological activity of A-type cyclins and/or a single B-type cyclin (CYCB3;1) are shown to contribute to meiosis-related processes. Other examples of genes useful for promoting transitions into a meiotic cell cycle include ectopic overexpression of TAM (Tardy Asynchronous Meiosis, also known as CYCA1;2), OSD1 (Omission Of Second Division), TDM (Three-Division Mutant), and SMG7 (Suppressor With Morphogenetic Effects On Genitalia 7). Exemplary candidate sequences are shown in Table 19.

TABLE 19

| | Sequence | Sequence | |
|---|---|---|---|
| Sequence Name | ID (DNA) | ID (protein) | Organism |
| cyca2; 1-1 | 203 | 204 | Arabidopsis thaliana |
| cyca2; 2-1 | 205 | 206 | Arabidopsis thaliana |
| cyca3; 2-2 | 207 | 208 | Arabidopsis thaliana |
| cyca3; 3-1 | 209 | 210 | Arabidopsis thaliana |
| cyca3; 4-1 | 211 | 212 | Arabidopsis thaliana |
| cycb3; 1-1 | 213 | 214 | Arabidopsis thaliana |
| sds-3 | 215 | 216 | Arabidopsis thaliana |
| smg7-1 | 217 | 218 | Arabidopsis thaliana |
| tam-2 | 219 | 220 | Arabidopsis thaliana |
| tdm1-1 | 221 | 222 | Arabidopsis thaliana |
| osd1 | 223 | 224 | Arabidopsis thaliana |
| ZM- Cyclin-A2-1-Like | 225 | 226 | Zea mays |
| ZM- Cyclin-A2-1-Like | 227 | 228 | Zea mays |
| ZM-Cyclin-A1-2-Like | 229 | 230 | Zea mays |
| ZM-Cyclin-A3-3-Like | 231 | 232 | Zea mays |
| ZM-Cyclin-A3-4-Like | 233 | 234 | Zea mays |
| ZM-Cyclin-A3-4-Like | 235 | 236 | Zea mays |
| ZM-Cyclin-A3-4-Like | 237 | 238 | Zea mays |
| ZM-cyclin-B3-1-Like | 239 | 240 | Zea mays |
| ZM-cyclin-B3-1-Like | 241 | 242 | Zea mays |
| ZM-cyclin-B3-1-Like | 243 | 244 | Zea mays |
| ZM-Cyclin-SDS-Like | 245 | 246 | Zea mays |
| ZM-Cyclin-SDS-Like | 247 | 248 | Zea mays |
| ZM-smg7-Like | 249 | 250 | Zea mays |
| ZM-smg7-Like | 251 | 252 | Zea mays |
| ZM-OSD1-Like | 253 | 254 | Zea mays |
| ZM-AMEI0TIC1 | 255 | 256 | Zea mays |

[0340] As previously reported the regulatory network controlling the transition from mitosis to meiosis in Schizosaccharomyces pombe comprises the regulation of Mei2, an RNA binding protein required for conjugation and meiotic entry, Ste11, a transcription activator required for the sexual differentiation, in conjunction with multiple feedback loops involving Pat1, a kinase that keeps cells in mitosis. Given a key role for Mei2 and Ste11 activity in S. pombe and that homologs are present in higher plants, such meiosis-specific gene products are also considered useful in the methods of the present disclosure. Providing meiosis-specific gene products to a cell comprises contacting a cell with meiosis-specific proteins and/or meiosis-specific RNA molecules. For example, Meiosis protein mei2 (Mei2), an RNA binding protein essential for the initiation of meiosis antagonizes selective elimination of meiotic messenger RNAs such as the long non-coding RNA (lncRNA), called “meiRNA”, transcribed from the sme2 gene. Thus, methods of the present disclosure can provide such a protein, or such an RNA molecule, or preferentially, a combination of the two components, to a cell.

[0341] Given that S. pombe has been used as a model system, exemplary Zea mays sequences as shown in Table 20, including the exemplary mutations of conserved amino acid residues to reduce phosphorylation sites are provided that are useful in the methods of the present disclosure. RNA binding proteins can encode an RNA recognition motif (RRM), with the C-terminal RRM being required for meiosis initiation and may be useful in the methods of the present disclosure. Protein containing RRMs are also of interest. One RRM containing an eight amino acid consensus sequence is RRM-1, also called “RNP-1” (see PFAM motif PF00076); a second RRM containing a six amino acid consensus sequence is RRM-2, also called “RNP-2” (see PFAM motif PF04059) may be useful in the methods of the disclosure. More generally, such proteins can contain an RNA-binding domain or RNA recognition motif.

TABLE 20

| | | DNA | | | | |
|---|---|---|---|---|---|---|
| | | Seq | Protein | peptide | Motif location | Motif/ |
| Sequence ID | Species | ID | Seq ID | length | (a.a. residues) | Domain Name |
| dpzm01g062390 | Zea mays | 257 | 268 | 326 | 105-170 | RRM_1 |
| | | | | | 104-172 | RNA recognition |
| | | | | | | motif |
| | | | | | 69-195 | RNA-binding |
| | | | | | | domain |
| dpzm02g083410 | Zea mays | 258 | 269 | 345 | 107-170 | RRM_1 |
| | | | | | 104-172 | RNA recognition |
| | | | | | | motif |
| | | | | | 103-176 | RNA recognition |
| | | | | | | motif |
| | | | | | 69-197 | RNA-binding |
| | | | | | | domain |
| dpzm03g043550 | Zea mays | 259 | 270 | 664 | 229-284 | RRM_1 |
| | | | | | 95-164; | RNA recognition |
| | | | | | 220-287; | motif |
| | | | | | 450-535 | |
| | | | | | 219-291 | RNA recognition |
| | | | | | | motif |
| | | | | | 448-559 | RRM_2 |
| | | | | | 92-298; | RNA-binding |
| | | | | | 448-552 | domain |
| dpzm04g003160 | Zea mays | 260 | 271 | 361 | 67-131 | RRM_1 |
| | | | | | 66-134 | RNA recognition |
| | | | | | | motif |
| | | | | | 65-138 | RNA recognition |
| | | | | | | motif |
| | | | | | 54-166 | RNA-binding |
| | | | | | | domain |
| dpzm04g029070 | Zea mays | 261 | 272 | 959 | 270-334; | RRM_1 |
| | | | | | 355-419 | |
| | | | | | 269-337; | RNA recognition |
| | | | | | 354-422; | motif |
| | | | | | 824-900 | |
| | | | | | 268-341; | RNA recognition |
| | | | | | 353-421 | motif |
| | | | | | 822-918 | RRM_2 |
| | | | | | 266-421; | RNA-binding |
| | | | | | 822-911 | domain |
| dpzm05g050650 | Zea mays | 262 | 273 | 995 | 270-334; | RRM_1 |
| | | | | | 355-420 | |
| | | | | | 269-337; | RNA recognition |
| | | | | | 354-422; | motif |
| | | | | | 823-899 | |
| | | | | | 268-341; | RNA recognition |
| | | | | | 353-426 | motif |
| | | | | | 821-917 | RRM_2 |
| | | | | | 266-433; | RNA-binding |
| | | | | | 821-910 | domain |
| dpzm06g013850 | Zea mays | 263 | 274 | 940 | 275-337 | RRM_1 |
| | | | | | 274-342; | RNA recognition |
| | | | | | 359-427; | motif |
| | | | | | 784-860 | |
| | | | | | 273-346; | RNA recognition |
| | | | | | 358-431 | motif |
| | | | | | 782-878 | RRM_2 |
| | | | | | 375-419 | RRM_5 |
| | | | | | 272-438; | RNA-binding |
| | | | | | 782-871 | domain |
| dpzm06g015820 | Zea mays | 264 | 275 | 316 | 253-315 | RRM_2 |
| | | | | | 253-315 | RNA-binding |
| | | | | | | domain |
| dpzm06g015830 | Zea mays | 265 | 276 | 823 | 176-240; | RRM_1 |
| | | | | | 261-326 | |
| | | | | | 175-243; | RNA recognition |
| | | | | | 260-328; | motif |
| | | | | | 661-737 | |
| | | | | | 174-247; | RNA recognition |
| | | | | | 259-332 | motif |
| | | | | | 659-755 | RRM_2 |
| | | | | | 172-339; | RNA-binding |
| | | | | | 659-748 | domain |
| dpzm09g012200 | Zea mays | 266 | 277 | 847 | 200-264; | RRM_1 |
| | | | | | 285-350 | |
| | | | | | 199-267; | RNA recognition |
| | | | | | 284-352 | motif |
| | | | | | 198-271; | RNA recognition |
| | | | | | 283-356 | motif |
| | | | | | 683-779 | RRM_2 |
| | | | | | 196-363 | RNA-binding |
| | | | | | | domain |
| dpzm10g029750 | Zea mays | 267 | 278 | 952 | 243-307; | RRM_1 |
| | | | | | 329-390 | |
| | | | | | 242-310; | RNA recognition |
| | | | | | 326-396 | motif |
| | | | | | 241-314; | RNA recognition |
| | | | | | 325-398 | motif |
| | | | | | 772-868 | RRM_2 |
| | | | | | 235-405; | RNA-binding |
| | | | | | 772-861 | domain |

[0342] The activity of the Mei2 protein is inactivated by the PAT1 kinase-mediated phosphorylation leading to Mei2 degradation by the proteasome. It was previously demonstrated that mutants of Mei2 that cannot be phosphorylated, and thus were not degraded, ectopically initiated meiosis. Such mutant alleles had substitutions comprising serine 438 changed to proline, tryptophan 442 changed to arginine, and arginine 524 change to alanine, or arginine 524 changed to serine. Thus, providing a modified form of a meiosis-specific proteins with reduced phosphorylation sites and therefore improved stability and ability to initiate meiosis to a cell is of interest for use in the methods of the present disclosure. An exemplary sequence is provided for a maize optimized Z. mays MEI2-like homolog, dpzm10g029750 (SEQ ID NO: 267), here with a conserved serine at position 573 substituted to proline to abolish a target site characteristic for many protein-serine/threonine kinases (SEQ ID NO: 279; SEQ ID NO: 280).

[0343] Sequences containing other amino acid substitutions resulting in the loss of kinase target sites required for proteasome-mediated degradation of a plant MIE2-like protein can also be used in the methods of the present disclosure. For example, similar modifications to the other peptides provided in Table 20 are considered useful in the methods of the present disclosure.

[0344] For methods providing an RNA binding protein that is a meiosis-specific protein, providing a meiosis-specific RNA molecule would be useful in the methods of the present disclosure. For example, Mei2 antagonizes selective elimination of meiotic messenger RNAs such as the long non-coding RNA (lncRNA), called “meiRNA”, transcribed from the sme2 gene. Using the methods of the present disclosure that provide meiRNA to a cell will promote, alone or in combination with a MIE2-like protein, improved induction of a meiosis cell cycle program.

[0345] Given a key role for other gene activities during meiosis in S. pombe, such as the Ste11 transcription factor that is a critical regulator of sexual development, additional meiosis gene products are provided as proteins useful in the methods of the present disclosure as shown in Table 21. Co-expressing a gene product as provided in Table 19, 20, or 21 alone, or combinations thereof, can be useful for controlling a cell's commitment to entry into meiosis.

TABLE 21

| Plant meiotic gene product | | | | |
|---|---|---|---|---|
| | Arabidopsis thaliana | | SEQ ID NO: | |
| Count | candidate gene | Zea mays gene | DNA | Protein |
| 1 | DMC1 | dpzm03g034840.1.1 | 281 | 299 |
| 2 | PTD | dpzm08g021210.1.1 | 282 | 300 |
| 3 | PHS1 | dpzm09g018240.1.1 | 283 | 301 |
| 4 | SWI1 (aka DYAD) | dpzm01g055280.1.1 | 284 | 302 |
| 5 | MER3 (aka RCK) | dpzm04g037550.1.1 | 285 | 303 |
| 6 | PRD3 | dpzm01g001030.1.1 | 286 | 304 |
| 7 | DIF1 (aka SYN1; REC8) | dpzm00g010100.1.1 | 287 | 305 |
| 8 | ASY1 | dpzm02g061410.1.1 | 288 | 306 |
| 9 | MND1 | dpzm02g048810.1.1 | 289 | 307 |
| 10 | SPO11-2 | dpzm04g014250.1.1 | 290 | 308 |
| 11 | MUS81 | dpzm03g039530.1.1 | 291 | 309 |
| 12 | RAD51 | dpzm07g049680.1.1 | 292 | 310 |
| 13 | ZYP1 | dpzm10g033590.1.1 | 293 | 311 |
| 14 | RMI1 | dpzm02g028550.1.1 | 294 | 312 |
| 15 | DUET (aka MMD1) | dpzm05g007690.1.1 | 295 | 313 |
| 16 | PS1 | dpzm02g043520.1.1 | 296 | 314 |
| 17 | SPO11-1 | dpzm05g005660.1.1 | 297 | 315 |
| 18 | COM1 (aka GR1) | dpzm09g029340.1.1 | 298 | 316 |

[0346] After a F1 hybrid embryo is isolated, mitotic cell cycle activation is initiated using methods described in Example 3 and 5, and during this process the cells can be exposed to redox-modulatory conditions described above, that can simultaneously include contacting the cells with a gene product, or gene products, useful for committing entry of the cell into meiosis (see Example 14), thereby promoting entry into a meiotic cell cycle program to acquire a germ cell fate. After incubation using resting medium under such conditions, an induced embryo containing a meiotically recombined genome that is equivalent to a new haploid gamete is individually transferred onto regeneration medium (289Q).

[0347] Preferentially, meiotically recombinant cells generated by this method can be separated using vortexing to separate the germinating embryos. For example, at twenty (20) days post Agrobacterium tumefaciens infection, the developing tissue is transferred to a sterile 50 ml centrifuge tube containing approximately twenty (20) mL of liquid, vortexed, and the tissue is transferred onto regeneration medium (289Q). The embryos are cultured under dark conditions until shoot and root formation is initiated and then transferred under light conditions for plantlet regeneration.

[0348] In one aspect, dissected haploid embryos can be transferred to resting regeneration medium (605J or 289Q medium) with a chromosome doubling (or mitotic inhibitor) agent, for example colchicine at concentrations of 0.1-1.0 g/ml to cause mitotic arrest of dividing cells at metaphase by interfering with microtubule organization, for example for a 24-hour period and then transferring to a regeneration resting medium (e.g. 605J, 289Q medium, or preferentially 605T medium) without a chromosome doubling agent followed by incubation at 28° C. under dark conditions. After three (3) to seven (7) days, the embryos are transferred to maturation medium (289Q medium) without selection.

[0349] In another aspect, meiotically recombinant haploid cells can be isolated and two such cells can be fused either electrically or chemically and such cultured products have been shown to develop into fertile plants.

[0350] After completing such a chromosome doubling treatment or a cell fusion treatment, a sub-cultured tissue is transferred to a light culture room at 26° C. until healthy plantlets with good roots develop. Approximately 7-14 days later, plantlets are transferred to soil and typically grown for one week in a growth chamber, subsequently grown an additional 1-2 weeks in the greenhouse, and then transplanted to soil and grown to maturity.

[0351] After a regenerated plant further develops, a leaf tissue sample can be collected per plant, DNA is isolated, and a diagnostic PCR-based assay is performed to detect presence/absence of a T-DNA, and or any related plasmid DNA sequence, and/or to compute genomic estimated breeding values (GEBVs) as described in Example 6.

[0352] The creation of novel genetic entities is achieved by ectopically activating meiotic recombination before, during, or after initiation of mitosis, thus providing a novel approach for performing “in vitro nursery” breeding activities. In contrast to the results shown in Example 5, wherein the resulting somatic embryos are clonal somatic embryos, here the method produces non-clonal gametic cells used to generate fertile plants useful for plant breeding.

[0353] Entry into meiosis comprises two parts, i) exit from the mitotic cell cycle and, ii) induction of the alternate meiotic cell cycle program, here the methods of the present disclosure promote entry into a meiotic cell cycle program, for example in response to mitotic cell cycle activity as shown in Example 5. Methods of stimulating entry into a meiotic cell cycle program comprising cell treatments that increase hypoxia and or lower cellular hydrogen peroxide levels, using either environmental and or chemical methods, and cell treatments providing activity of a gene product, or gene products, are expected to be useful for committing entry of the cell into meiosis and it is furthermore expected that combinations of these methods can result in greater efficacy.

[0354] Likewise, it is expected that simultaneously providing two or more gene products useful for inducing a meiotic cell cycle program, including but not limited to proteins described in Tables 19, 20 and or 21, can result in greater efficacy for inducing a meiotic cell cycle program, thereby improving the productivity of the methods disclosed herein of obtaining embryogenic cells with genomes produced by meiotic recombination.

[0355] Thus, it is expected that a treated embryo explant, such as an F1 embryo resultant from biparental fertilization between two inbred plants, can be cultured to produce embryogenic cells having genomes that are each the product of meiotic recombination. After using the methods disclosed herein, it is expected an embryogenic cell can produce a plant with a genome comprising a novel genetic entity that is useful for plant breeding.

### Example 14: Transiently Expressing Meiotic Genes for In Vitro Plant Breeding

[0356] The methods of stimulating entry into a meiotic cell cycle program described in Example 13 comprise providing the activity of a gene product, or gene products, useful for committing entry of the cell into meiosis.

[0357] Methods for transiently expressing such meiotic genes are now described. Specifically, in this experiment, an Agrobacterium with a plasmid as shown in Table 16 can be used, for example RV020636 (SEQ ID NO: 186), to stimulate mitotic activity and embryogenesis in a plant cell. Here a second Agrobacterium with a plasmid comprising an expression cassette with a polynucleotide encoding a “meiosis induction” protein is used. More specifically this expression cassette can have one or more polynucleotide sequences encoding the gene products as described in Table 19, 20 and/or 21.

[0358] In an aspect, the meiosis induction expression cassette can be designed for Agrobacterium-mediated protein expression, wherein the polynucleotide does not integrate into the genome of the plant and the plant does not contain vector (plasmid) backbone.

[0359] One method includes “beyond the border” plasmid designs.

[0360] Another method uses Agrobacterium-mediated transient protein delivery into a plant cell and is used here specifically for delivery into a plant cell of meiosis-specific gene products as described in Example 13. Here, this method comprises using Agrobacterium to achieve both synthesis and delivery of polypeptides described in Table 19, 20, and/or 21.

[0361] Functional delivery of a protein is accomplished, for example 0-glucuronidase (GUS), by using a polynucleotide encoding virF that was operably linked to a polynucleotide encoding the GUS protein. A virF-gusA (also virF-uidA) fusion construct was placed on a replicon without T-DNA borders that replicates in Agrobacterium tumefaciens. In the replicon the polynucleotides encoding VirF and GUS were operably linked. This construction was placed under the control of the virF promoter and, consequently, was regulated by the virA/virG genes as part of the phenolic-induced vir regulon. The replicon was introduced into the wild-type octopine strain A. tumefaciens A348. Expression of the virF-gusA fusion construct in Agrobacterium was partially independent of acetosyringone (AS) induction. However, even with the incomplete AS dependence, induction of VirF-GUS expression by AS was increased significantly in Agrobacterium, as measured by GUS fluorometric analyses.

[0362] Using the method of the present disclosure, a first Agrobacterium strain with plasmid RV020636 as described in Example 5 is used. Upon infection, this plasmid provides a T-DNA to a first plant cell that allows the first plant cell to express the WUS protein. The WUS protein can move in a non-cell autonomous manner, thereby the protein is provided to a second plant cell. In the present method, the second plant cell is not exposed to the presence of a T-DNA.

[0363] Once a second plant cell is contacted with a WUS protein, the second plant cell is then simultaneously contacted with a meiosis-specific gene product, or products, resulting from co-infection with a second Agrobacterium strain. Here, the second Agrobacterium strain provides translocation into the second plant cell by expressing a translational fusion protein comprising a Vir translocation peptide domain fused to a peptide described in Table 19, 20, and/or 21. In the present method, a polynucleotide encoding the translational fusion protein, or proteins, is operably linked to the virF promoter and, consequently, is regulated by the virA/virG genes as part of the phenolic-induced vir regulon. Here, a virF-meiosis induction replicon introduced into an A. tumefaciens strain, for example AGL1 THY− without T-DNA borders, which is used to transiently express and ectopically deliver the meiosis induction protein(s) into a plant cell.

[0364] Specifically, co-infection using two Agrobacterium strains as described above provides a combination of i) mitotic cell cycle activity and ii) induction of an alternate meiotic cell cycle program to result in the development of haploid, embryogenic cells having genomes produced by meiotic recombination.

[0365] In the methods of the present disclosure, an immature F1 hybrid embryo is an exemplary explant used for the following treatment. Using the two Agrobacterium strains as described above, the two different strains are combined in a mixture, for example a mixture with a first Agrobacterium strain encoding the WUS protein expression cassette (Agro1) and a second Agrobacterium strain encoding the meiosis induction expression cassette (Agro2). Ratios of Agro1:Agro2 can be 95:5, or 90:10, and other ratios. For treating a cell of the F1 hybrid diploid embryo, the bacterial/plant cell ratio of approximately 1000:1 is used.

[0366] After 24 hours, the plant cells are washed, and the medium replaced with medium containing timentin to kill Agrobacterium. Preferentially, the cells can be cultured using the environmental and or chemical treatments as described in Example 13 before, during, or after Agrobacterium co-infection. Following co-cultivation each diploid embryo exhibiting a somatic embryogenesis response is cultured and plantlets are regenerated as described in Example 13.

[0367] The transient expression method described herein provides a method for simultaneous co-infection of a plant explant, for example an immature F1 hybrid embryo. Such methods described herein are useful for both precociously expressing meiotic genes and for transporting such ectopic activity into a plant cell, such as the protein activities described in Example 13. It is also expected that changing the redox potential of cells can further improve the induction of a meiotic cell cycle program in response to the co-infection process described. Thus, it is expected that this method enables capabilities for creating plants derived from somatic embryos that are F2 generation equivalents, thereby providing a novel method useful for “in vitro nursery” breeding activities.

### Example 15: Generating Wheat Clonal Doubled Haploids Using Homology-Directed Repair (HDR)

[0368] The following experiments demonstrate using a gene targeting system to facilitate directional targeting of desired genes and nucleotide sequences into corresponding homologous recombination sites on each of three paired (homologous) sets of chromosomes of a wheat (Triticum aestivum) haploid cell.

[0369] Immature wheat haploid embryos are created, for example using wide hybridization methods. Expression of an AP2 domain transcription factor can induce haploid induction. For such AP2 domain transcription factor methods, Agrobacterium-mediated stable plant transformation is employed. For example, the ODP2 nucleotide sequence introduced into the plant is under the control of a tissue specific promoter that is active in a haploid cell or tissue or a promoter that is active during male or female gamete development. Alternatively, the ODP2 nucleotide sequence is under the control of an inducible promoter and the application of the inducer allows expression of the ODP2 sequence therein. Alternatively, the promoter used can be both inducible and tissue-preferred. For example, the promoter can be both haploid-tissue specific and inducible.

[0370] Preferentially, methods of the present disclosure can further use site-specific recombination systems in combination with such an ODP2 expression cassette operably linked to such promoters (i.e., constitutive promoters, tissue-specific promoters, or inducible promoters). For example, by using a first lox site and a second lox site flanking the ODP2 expression cassette, wherein the promoter is operably linked to a polynucleotide encoding the ODP2 polypeptide to be active during either male or female gamete development.

[0371] A promoter expressed in the egg cell of the plant is useful for regulating ODP2 expression to promote maternal haploid induction, resulting in a percentage of the progeny to be haploid having half the number of chromosomes compared to the parent. For example, using exemplary promoters including but not limited to AT-DD5, AT-DD31, AT-DD65, or more preferentially the ZM-DD45 promoter. Additionally, a Zea mays egg cell promoter operably linked to a polynucleotide encoding the ODP2 protein and a 3′ UTR from a Zea mays egg cell gene can be used.

[0372] The methods of the present disclosure further comprise transforming a F1 hybrid wheat embryo with Agrobacterium strain LBA4404 THY− (See U.S. Pat. No. 8,334,429 incorporated herein by reference in its entirety) as described in Example 3. Transformation of a F1 hybrid wheat embryo is performed to create a stable, hemizygous transgenic plant containing the ODP2 expression cassette operably linked to an egg cell promoter. Upon transitioning to the reproductive phase, the plant self-fertilizes, and maternal haploid embryos can be collected.

[0373] Clonal propagation of clonal doubled haploid plants in combination with gene targeting is performed by then transforming a maternal haploid embryo using Agrobacterium transformation methods as described above. In the current method, a mixture with another Agrobacterium, here containing a gene targeting plasmid with a T-DNA comprised of multiple “Traits” (for example a zinc finger nuclease, a donor excision template encoding a trait gene, and an anthocyanin color marker; see Table 9) can be used.

[0374] Agrobacterium strains are mixed at a ratio of 95% Trait-containing plasmid (for example, PHP90670 (SEQ ID NO: 192) to 5% WUS-containing plasmid (RV020636 (SEQ ID NO: 186). When haploid embryos are co-infected with this Agrobacterium mixture, transgenic TO plants containing only a single copy of the “Trait” T-DNA (PHP90670) with no integration of the WUS-containing T-DNA (RV020636) are regenerated. Upon expression of the Trait T-DNA (PHP90670), activity of the enhanced zinc finger nuclease (EXZFN) will excise the donor template encoded in the “Trait” T-DNA, thereby allowing homology directed repair and stable transgene integration at each targeted double strand break site.

[0375] Transformed cells with excised donor templates can be detected using morphological detection of anthocyanins expressed by a functional B-Peru gene resulting from excision of the donor template, thereby allowing B-Peru gene regulation from the ZmGlob1 regulatory sequence. Stable transgenic plants are identified using positive selection, for example by identifying plants with herbicide resistance to haloxyfop.

[0376] It is expected that culturing such plants in the presence of a chromosome doubling agent as described in Example 6 will facilitate chromosome doubling and diploidization of the stable transgenic doubled plants.

[0377] It is expected that each hemizygous, single copy plant with herbicide tolerance will have a “Trait” gene inserted at a targeted site in the genome and the remnant “Trait” T-DNA comprising the repaired T-DNA sequence inserted at a random position in the genome.

[0378] Within a doubled haploid clone set possessing the “Trait” gene inserted at targeted sites, selecting clonal individuals for cross-fertilization is performed, thereby creating seed of this cross to be propagated. Some progeny can be expected to be wild type at loci segregating for each random T-DNA insertion site comprising the repaired “Trait” T-DNA sequence with also inheritance of alleles from both parental gametes with a successful gene targeting event at the targeted transgene integration site. Selection of an individual without the repaired “Trait” T-DNA, while possessing alleles with a successful gene targeting event at the targeted transgene integration sites can be self-fertilized. Further propagation of such plants will then segregate as clonal doubled haploids with homozygous copies of the “Trait” gene at each homologous chromosome's target site.

[0379] It is expected that methods using an expression cassette encoding CRE recombinase as a component in the gene targeting construct, such as RV036376 (SEQ ID NO: 317), can be used for excising the ODP2 expression cassette when a first lox site and a second lox site is flanking the ODP2 expression cassette. In this manner, the resulting doubled haploid plants with homozygous copies of the “Trait” gene at each homologous chromosome's target site are regenerated without the random T-DNA insertion site comprising the repaired “Trait” T-DNA sequence and furthermore are lacking the ODP2 expression cassette that was required for conferring maternal haploid induction.

[0380] It is expected that the above methods described for maternal haploid induction in combination with propagating clonal doubled haploid progeny possessing gene targeting events can be used with paternal haploid induction systems. For example, an ODP2 expression cassette operably linked to a promoter that is active during microspore development can be used, such as the maize PG47 promoter for treatment of a cell derived from a paternal gamete using methods as described in Example 12. In the present disclosure, Agrobacterium strains are mixed at a ratio of 95% Trait-containing plasmid (for example, PHP90670 (SEQ ID NO: 192)) to 5% WUS-containing plasmid (RV020636 (SEQ ID NO: 186)) to create clonal doubled haploids with homozygous copies of the “Trait” gene at each homologous chromosome's target site.

[0381] Preferentially, use of a first lox site and a second lox site flanking the ODP2 expression cassette and the presence of an expression cassette encoding the CRE recombinase protein can be used for excising the ODP2 expression cassette that was required for conferring paternal haploid induction.

[0382] The methods of the present disclosure are an improvement to the current state of the art and accelerate trait introgression using wheat haploid induction breeding methods, thus, enabling forward breeding capabilities for site-directed transgene integration in wheat doubled haploids without the need for backcrossing-mediated trait introgression.

### Example 16: Using Viral Enhancers with the Maize PLTP Promoter to Drive WUS2 Expression Enhances Recovery of Non-Transgenic Somatic Embryos and Plants in Wheat

[0383] Experiment 1. Freshly harvested wheat immature grains were sterilized with 50% bleach and 0.1% Tween-20 for thirty (30) minutes under vacuum and then rinsed with sterile water three times. Agrobacterium strain LBA4404 THY− containing the virulence plasmid PHP71539 (SEQ ID NO: 184) was used in all treatments. In a (control) first treatment, an Agrobacterium containing PHP71539 (SEQ ID NO: 184) (with no T-DNA) was adjusted to an OD of 1.0 (600 nm) in liquid 716B medium, and immature wheat embryos were added to the Agrobacterium suspension for twenty (20) minutes at room temperature (25° C.). In a second treatment, a second Agrobacterium containing both PHP71539 (SEQ ID NO: 184) and PHP88158 (SEQ ID NO: 182) (RB+3×ENH::ZM-PLTP PRO::ZM-WUS2::IN2-1 TERM+NOS PRO::CRC::SB-GKAF TERM+LB) was mixed with the Agrobacterium containing only PHP71539 (SEQ ID NO: 184), both Agrobacterium strain suspensions first being adjusted to an OD of 1.0 (600 nm) and then mixed at a ratio of 90% PHP71539 alone (SEQ ID NO: 184) to 10% PHP71539 (SEQ ID NO: 184)+PHP88158 (SEQ ID NO: 182). After a 15-minute liquid infection treatment, the immature embryos were removed from the liquid medium and transferred onto solid 606 medium and oriented scutellum-side up for culture at 21° C. in the dark overnight. The embryos were transferred again onto fresh resting medium (606) for ten (10) days, then onto regeneration medium 689E with selection in the dark. The tissue was then moved onto regeneration medium 689E with selection in the light and then the number of plants produced was tabulated.

[0384] In the (control) first treatment, fifty-six (56) immature embryos of Spring wheat variety SBC0456D were infected with the Agrobacterium. Eight (8) of the immature embryos produced a single plant from a scutellum-derived somatic embryo, six (6) immature embryos produced two (2) plants each, and seven (7) immature embryos produced 3 or more plants per starting immature embryo, for a total production of ≥41 plants (all being confirmed by PCR to be non-transgenic). In the second treatment, a total of sixty-nine (69) immature embryos were infected. Twenty (20) immature embryos each produced a single scutellum-derived plant, twenty-two (22) immature embryos each produced two (2) plants, and over twenty-seven (27) immature embryos each produced three (3) or more plants, for a total production of ≥144 plants (all being confirmed by PCR to be non-transgenic). The second treatment provided a substantial improvement in micro-propagation production of non-transgenic plants that are then ready for transfer to the greenhouse. The final molecular analysis confirmed that the plants generated by this method were non-transgenic, containing no T-DNA with the morphogenic expression cassette(s) and no Agrobacterium plasmid backbone sequences (present in both plasmids) being integrated.

[0385] Finally, the promoter used to express the ZM-WUS2 gene can be switched from the ZM-PLTP promoter to the barley LTP2 promoter. Both plant promoters are preceded by three promoter enhancer elements from three separate viruses, the Figwort Mosaic Virus, the Peanut Chlorotic Streak Virus, and the Mirabilis Mosaic Virus. When this new promoter is used, it is expected that the stimulation of non-transgenic somatic embryos from the scutellum of the immature embryos will be further enhanced resulting in greater numbers of non-transgenic plants being produced.

[0386] b) Experiment 2. Wheat immature embryos were harvested, transformed using Agrobacterium, and cultured, as described above in Experiment 1 of this Example 16. Results for the four treatments are summarized in FIGS. 3-6.

[0387] In the (control) first treatment (FIG. 3), twenty-six (26) immature embryos of Spring wheat variety SBC0456D were infected with the Agrobacterium containing the virulence plasmid PHP71539 (SEQ ID NO: 184), with a total of nineteen (19) producing no response. Of the remaining seven (7) immature embryos, three (3) each produced one (1) R0 plant, three (3) each produced two (2) R0 plants, and one (1) immature embryo produced four (4) R0 plants, for a total production of seven (7) R0 plants (all being confirmed by PCR to be non-transgenic). Thus, in the (control) first treatment, the R0 propagation frequency was 27% (7 R0 plants/26 embryos).

[0388] In the second treatment (FIG. 4), where the second Agrobacterium containing both PHP71539 (SEQ ID NO: 184) and PHP88158 (SEQ ID NO: 182) (RB+3×ENH::ZM-PLTP PRO::ZM-WUS2::IN2-1 TERM+NOS PRO::CRC::SB-GKAF TERM+LB) was mixed with the Agrobacterium containing only PHP71539 (SEQ ID NO: 184), a total of thirty-five (35) wheat immature embryos were infected. However, in contrast to the control treatment in which the majority of the immature embryos showed no response, delivery of the WUS2-containing T-DNA (PHP88158 (SEQ ID NO: 182)) resulted in only two (2) of thirty-five (35) embryos being non-responsive (FIG. 4) and producing no R0 plants. For this treatment, three (3) immature embryos produced a single (1) R0 plant, while one (1), five (5) or four (4) immature embryos produced two (2), three (3), or four (4) R0 plants/embryo respectively. In addition, a total of fifteen (15) if the thirty-five (35) infected immature embryos produced between six (6) and twelve (12) R0 plants per starting embryo. For this treatment, a total of one hundred eighty-two (182) R0 plants were produced for a R0 propagation frequency of 520% (182 R0 plants/35 embryos).

[0389] In a third wheat treatment (FIG. 5), where the second Agrobacterium containing both PHP71539 (SEQ ID NO: 184) and PHP25340 (SEQ ID NO: 193) (RB+UBI PRO::CFP::PINII TERM+3×ENH::ZM-PLTP PRO::ZM-ODP2::IN2-1 TERM+LB) was mixed with the Agrobacterium containing only PHP71539 (SEQ ID NO: 184), a total of thirty-eight (38) wheat immature embryos were infected. Twenty-two (22) immature embryos produced no response (zero (0) R0 shoots were produced). Of the remaining sixteen (16) immature embryos, five (5) embryos each produced a single plant, four (4) embryos each produced two (2) plants, four (4) embryos each produced three (3) plants, and each of three (3) single embryos produced either four (4), six (6), or eight (8) plants/embryo. Thus, a total of forty-three (43) R0 plants were produced from total of thirty-eight (38) immature embryos treated for a R0 propagation frequency of 113% (43 R0 plants/38 embryos).

[0390] In the final treatment for wheat (FIG. 6), where the second Agrobacterium containing both PHP71539 (SEQ ID NO: 184) and PHP91539 (SEQ ID NO: 194) (RB+3×ENH::ZM-PLTP PRO::ZM-WUS2::IN2-1 TERM+ZM-PLTP1 PRO::ZM-ODP2::OS-T28 TERM+NOS PRO::CRC::SB-GKAF TERM+LB) was mixed with the Agrobacterium containing only PHP71539 (SEQ ID NO: 184) the R0 plant propagation rate was again greatly simulated (see FIG. 6). In this treatment, a total of thirty-eight (38) wheat immature embryos were treated and only three (3) immature embryos produced no (0) R0 plants. Three (3) embryos each produced one (1) R0 plant, the remaining thirty-two (32) immature embryos each produced multiple R0 plants/immature embryo with the response ranging from two (2) plants/embryo to eleven (11) plants/embryo. In this treatment, the R0 plant propagation frequency was 442% (168 R0 plants/38 embryos).

[0391] For all three treatments where either ODP2, WUS2, or ODP2/WUS2 were introduced, a substantial increase in the total frequency of R0 plants produced as a function of starting embryo number was observed in wheat—when compared to the control. The substantial improvement in R0 plant propagation observed in all three morphogenic gene treatments is summarized in terms of total R0 propagation frequency (relative to the starting number of immature embryos) in Table 22 and is presented as the fold-increase relative to the control treatment in Table 23. Table 22 shows the R0 propagation frequency (%) after Agrobacterium infection harboring no T-DNA (SEQ ID NO: 184), or a T-DNA containing either 3×ENH::PLTP::ODP2 (SEQ ID NO: 193), 3×ENH::PLTP::WUS2 (SEQ ID NO: 182), or 3×ENH::PLTP::WUS2 plus PLTP::ODP2 (SEQ ID NO: 194). Table 23 shows the fold-increase in R0 propagation frequency (%) after Agrobacterium infection harboring a T-DNA containing either PLTP::ODP2 (ODP2), 3×ENH::PLTP::WUS2 (WUS), or 3×ENH::PLTP::WUS2 plus PLTP::ODP2 (WUS/ODP2)—relative to the control treatment where the Agrobacterium contained no T-DNA (control).

TABLE 22

| | R0 Propagation (%) | | | |
|---|---|---|---|---|
| | No T-DNA | ODP2 | WUS | WUS/ODP2 |
| | (SEQ ID | (SEQ ID | (SEQ ID | (SEQ ID |
| Crop | NO: 184) | NO: 193) | NO: 182) | NO: 194) |
| Maize | 26 | 30 | 154 | 218 |
| Sorghum | 182 | 249 | 312 | 329 |
| Wheat | 27 | 113 | 520 | 342 |

TABLE 23

| | Fold-increase in R0 Propagation Frequency % | | |
|---|---|---|---|
| | (relative to control treatment)* | | |
| | ODP2 | WUS | WUS/ODP2 |
| | (SEQ ID | (SEQ ID | (SEQ ID |
| Crop | NO: 193) | NO: 182) | NO: 194) |
| Maize | 1.1 | 5.9 | 8.4 |
| Sorghum | 1.4 | 1.7 | 1.8 |
| Wheat | 4.2 | 19.3 | 12.7 |

*Relative to control treatment

[0392] In this wheat experiment, all the R0 plants from the (control) first treatment (7 total) and third treatment (43 total), and a subset of plants from the second and final treatments (57 each of the second treatment and final treatment) were sampled for qPCR analysis, to determine the copy number of sequences internal to the T-DNA of the second Agrobacterium, specifically tested for copy number of two synthetic PCR-analytical sequences (PSB1 and PSA2) in addition to the ZM-WUS2/IN2-1 junction, and the T-DNA LEFT BORDER or copy number of VIRG, a sequence found only in the Agrobacterium plasmid backbone for both the first and second Agrobacterium strains. Out of one hundred and sixty-four (164) R0 plants analyzed, only one (1) had a positive band for WUS2, which was likely a false-positive since the other three qPCR markers for the T-DNA were negative. The remaining one hundred sixty-three (163) plants analyzed were determined to contain no T-DNA and no Agrobacterium plasmid backbone sequences (with the helper plasmid backbone (SEQ ID NO: 184) having been present in both the first and second Agrobacterium). After confirming these R0 plants with vigorous shoots and roots were transgene-free, they are then ready for transfer to the greenhouse.

### Example 17: Using Viral Enhancers with the Maize PLTP Promoter to Drive WUS2 Expression Enhances Recovery of Non-Transgenic Somatic Embryos and Plants in Sorghum

[0393] a) Experiment 1. Freshly harvested sorghum immature grains were sterilized with 50% bleach and 0.1% Tween-20 for thirty (30) minutes under vacuum and then rinsed with sterile water three (3) times. Agrobacterium strain LBA4404 THY− containing the virulence plasmid PHP71539 (SEQ ID NO: 184) was used in all treatments. In a (control) first treatment, an Agrobacterium containing PHP71539 (SEQ ID NO: 184) (with no T-DNA) was adjusted to an OD of 0.4 (550 nm) in liquid 700A medium, and immature sorghum embryos were added to the Agrobacterium suspension for 15 minutes at room temperature (25° C.). In the second treatment, a second Agrobacterium containing both PHP71539 (SEQ ID NO: 184) and PHP88158 (SEQ ID NO: 182) (RB+3×ENH::ZM-PLTP PRO::ZM-WUS2::IN2-1 TERM+NOS PRO::CRC::SB-GKAF TERM+LB) was mixed with the Agrobacterium containing only PHP71539 (SEQ ID NO: 184), both Agrobacterium strain suspensions first being adjusted to an OD of 0.4 (550 nm) and then mixed at a ratio of 90% PHP71539 alone (SEQ ID NO: 184) to 10% PHP71539 (SEQ ID NO: 184)+PHP88158 (SEQ ID NO: 182). After the 15-minute liquid infection treatment, the immature embryos were removed from the liquid medium and transferred onto solid medium 562V and oriented scutellum-side up for culture at 21° C. in the dark overnight.

[0394] The embryos were subjected to the following sequential steps after infection: (1) co-cultivation: embryos were cultured on PHI-T medium following infection for three (3) days at 25° C. in the dark; (2) resting: embryos were cultured on PHI-T medium plus 100 mg/l carbenicillin for four (4) days at 28° C. in the dark; (3) selection: embryos were cultured on PHI-U medium for two (2) weeks, followed by culture on PHI-V medium for the remainder of the selection process at 28° C. in the dark, using subculture intervals of two (2) to three (3) weeks; and (4) regeneration: callus was cultured on PHI-X medium for two (2) to three (3) week in the dark to stimulate shoot development, followed by culture for one (1) week under conditions of sixteen (16) hours light (40-120 μm-2 s-1) and eight (8) hours dark at 25° C., and a final subculture on PHI-Z medium for two (2) to three (3) weeks under lights (sixteen (16) hours, 40-120 μm-2 s-1) to stimulate root growth. Regenerated plantlets were tabulated and are now ready to be transplanted into soil and grown in the greenhouse.

[0395] In the (control) first treatment, seventy-three (73) immature embryos of sorghum variety Tx430 were infected with the Agrobacterium containing the virulence plasmid PHP71539 (SEQ ID NO: 184) (with no T-DNA). The treated immature embryos produced varying numbers of non-transgenic plants from each original immature embryo for a total of one hundred sixteen (116) plants produced. In the second treatment, a total of seventy-four (74) immature embryos were infected with the mixture of Agrobacterium strains in the ratio 90% PHP71539 (SEQ ID NO: 184) to 10% PHP71539 (SEQ ID NO: 184)+PHP88158 (SEQ ID NO: 182) and the number of regenerated plants from each of the infected immature embryos increased substantially with half of the originally treated immature embryos producing two (2) or more plants from the scutellum, with a total of two hundred twenty-two (221) plants being produced (see Table 24). The second treatment provided a substantial improvement in the final number of non-transgenic plants and provided a substantial improvement in micro-propagation producing non-transgenic plants that were then ready for transfer to the greenhouse. The final molecular analysis confirmed that the plants generated by this method were non-transgenic, containing no T-DNA with the morphogenic expression cassette(s) and no Agrobacterium plasmid backbone sequences (present in both plasmids) being integrated. Table 24 shows the number of Agrobacterium-infected immature embryos that produced varying numbers of non-transgenic plants from scutellar-derived somatic embryos.

TABLE 24

| | | | | | | | | | | Total |
|---|---|---|---|---|---|---|---|---|---|---|
| | No. of immature embryos producing “X” number of plants | | | | | | | | | No. |
| | 1 | 2 | 3 | 4 | 5 | 6 | 7 | 8 | 9 | Plants |
| 100% PHP71539 | 8 | 7 | 4 | 7 | 1 | 1 | 5 | 1 | 0 | 116 |
| (SEQ ID NO: 184) | | | | | | | | | | |
| 90% PHP71539 | 4 | 3 | 1 | 10 | 11 | 5 | 4 | 2 | 1 | 221 |
| (SEQ ID NO: 184)/ | | | | | | | | | | |
| 10% PHP71539 | | | | | | | | | | |
| (SEQ ID NO: 184) + | | | | | | | | | | |
| PHP88158 | | | | | | | | | | |
| (SEQ ID NO: 182) | | | | | | | | | | |

[0396] b) Experiment 2. Sorghum immature embryos were harvested, transformed using Agrobacterium, and cultured, as described above in Experiment 1 of this Example 17. Results for the four treatments are summarized in FIGS. 7-10.

[0397] In the (control) first treatment (FIG. 7), fifty-six (56) immature embryos of sorghum variety Tx430 were infected with the Agrobacterium containing the virulence plasmid PHP71539 (SEQ ID NO: 184), with a total of twenty-eight (28) producing no response. Of the remaining twenty-eight (28) immature embryos, five (5) each produced one (1) R0 plant, sox (6) each produced two (2) R0 plants, and seventeen (17) immature embryos each produced three (3) or more R0 plants per starting immature embryo, ranging as high as eight (8) R0 plants for one (1) starting embryo. All R0 plants produced were confirmed by qPCR to be non-transgenic (contained no integrated Agrobacterium sequences). Tabulating the total R0 plants produced one hundred two (102) relative to the fifty-six (56) starting immature embryos treated resulted in a total R0 propagation frequency of 182% (102 R0 plants/56 embryos).

[0398] In the second treatment (FIG. 8), where the second Agrobacterium where the second Agrobacterium containing both PHP71539 (SEQ ID NO: 184) and PHP88158 (SEQ ID NO: 182) (RB+3×ENH::ZM-PLTP PRO::ZM-WUS2::IN2-1 TERM+NOS PRO::CRC::SB-GKAF TERM+LB) was mixed with the Agrobacterium containing only PHP71539 (SEQ ID NO: 184), a total of thirty-three (33) sorghum immature embryos were infected, with a total of nine (9) immature embryos each producing no R0 plants (FIG. 8). For the remaining immature embryos in this treatment, the number of R0 plants produced/embryo ranged from one (1) R0 plant (observed for each of three (3) starting embryos) up to nine (9) R0 plants for one (1) starting embryo. For this treatment, a total of one hundred three (103) R0 plants were produced for a R0 propagation frequency of 312% (103 R0 plants/33 embryos).

[0399] In the third sorghum treatment (FIG. 9), where the second Agrobacterium containing both PHP71539 (SEQ ID NO: 184) and PHP25340 (SEQ ID NO: 193) (RB+UBI PRO::CFP::PINII TERM+3×ENH::ZM-PLTP PRO::ZM-ODP2::IN2-1 TERM+LB) was mixed with the Agrobacterium containing only PHP71539 (SEQ ID NO: 184), a total of seventy-five (75) sorghum immature embryos were infected. Thirty-five (35) produced no response (no R0 plants produced). Of the remaining forty (40) immature embryos, the numbers of R0 plants/embryos produced ranged from one (1) to nine (9), with the highest numbers of immature embryos falling in the middle of this range (FIG. 9). For this treatment, a total of one hundred eighty-seven (187) R0 plants were produced from a total of seventy-five (75) immature embryos treated for a R0 propagation frequency of 249% (187 R0 plants/75 embryos).

[0400] In the final treatment for sorghum (FIG. 10), where the second Agrobacterium containing both PHP71539 (SEQ ID NO: 184) and PHP91539 (SEQ ID NO: 194) (RB+3×ENH::ZM-PLTP PRO::ZM-WUS2::IN2-1 TERM+ZM-PLTP1 PRO::ZM-ODP2::OS-T28 TERM+NOS PRO::CRC::SB-GKAF TERM+LB) was mixed with the Agrobacterium containing only PHP71539 (SEQ ID NO: 184) the R0 plant propagation rate was again greatly simulated (FIG. 10). In this treatment, a total of sixty-six (66) Tx430 immature embryos were treated and only ten (10) immature embryos produced no (0) R0 plants. The remaining fifty-six (56) starting immature four (4) embryos each produced one (1) R0 plant, six (6) embryos each produced two (2) R0 plants, twelve (12) embryos each produced three (3) R0 plants, sixteen (16) embryos each produced four (4) R0 plants, nine (9) embryos each produced five (5) R0 plants, seven (7) embryos each produced six (6) R0 plants, and two (2) embryos each produced seven (7) R0 plants. For this treatment, a total of two hundred seventeen (217) R0 plants were produced from the sixty-six (66) starting immature embryos, for a R0 plant propagation frequency of 329% (217 R0 plants/66 embryos).

[0401] For all three treatments where either ODP2, WUS2, or ODP2/WUS2 were introduced, a substantial increase in the total frequency of R0 plants produced as a function of starting embryo number was observed in sorghum—when compared to the control. The substantial improvement in R0 plant propagation observed in all three morphogenic gene treatments is summarized in terms of total R0 propagation frequency (relative to the starting number of immature embryos) in Table 22 and is presented as the fold-increase relative to the control treatment in Table 23. Table 22 shows the R0 propagation frequency (%) after Agrobacterium infection harboring no T-DNA (SEQ ID NO: 184), or a T-DNA containing either 3×ENH::PLTP::ODP2 (SEQ ID NO: 193), 3×ENH::PLTP::WUS2 (SEQ ID NO: 182), or 3×ENH::PLTP::WUS2 plus PLTP::ODP2 (SEQ ID NO: 194). Table 23 shows the fold-increase in R0 propagation frequency (%) after Agrobacterium infection harboring a T-DNA containing either PLTP::ODP2 (ODP2), 3×ENH::PLTP::WUS2 (WUS), or 3×ENH::PLTP::WUS2 plus PLTP::ODP2 (WUS/ODP2)—relative to the control treatment where the Agrobacterium contained no T-DNA (control).

[0402] All plants produced in this experiment were sampled for qPCR analysis, to determine the copy number of sequences internal to the T-DNA of the second Agrobacterium, or a sequence found only in the Agrobacterium plasmid backbone (VIRG—which was present in both the first and second Agrobacterium strains). For all recovered plants, molecular analysis confirmed that R0 plants generated by this method were non-transgenic, containing no T-DNA with the morphogenic gene expression cassette(s) or no Agrobacterium plasmid backbone sequences (with the helper plasmid backbone having been present in both the first and second Agrobacterium).

### Example 18: Using Viral Enhancers with the Maize PLTP Promoter to Drive WUS2 Expression Enhances Recovery of Non-Transgenic Somatic Embryos and Plants in Maize

[0403] a) Experiment 1. Maize embryos are prepared as described above. Agrobacterium strain LBA4404 THY− containing the virulence plasmid PHP71539 (SEQ ID NO: 184) is used in all treatments. In a (control) first treatment, an Agrobacterium containing PHP71539 (SEQ ID NO: 184) (with no T-DNA) is adjusted to an OD of 0.4 (550 nm) in liquid 700A medium, and immature maize embryos are added to the Agrobacterium suspension for 15 minutes at room temperature (25° C.). In a second treatment, a second Agrobacterium containing both PHP71539 (SEQ ID NO: 184) and PHP88158 (SEQ ID NO: 182) (RB+3×ENH::ZM-PLTP PRO::ZM-WUS2::IN2-1 TERM+NOS PRO::CRC::SB-GKAF TERM+LB) is mixed with the Agrobacterium containing only PHP71539 (SEQ ID NO: 184), both Agrobacterium strain suspensions first being adjusted to an OD of 0.4 (550 nm) and then mixed at a ratio of 90% PHP71539 alone (SEQ ID NO: 184) to 10% PHP71539 (SEQ ID NO: 184)+PHP88158 (SEQ ID NO: 182). In a third treatment, a second Agrobacterium containing PHP71539 (SEQ ID NO: 184) and RV025340 (SEQ ID NO: 193) (RB+UBI PRO::CFP::PINII TERM+3×ENH::ZM-PLTP PRO::ZM-ODP2::IN2-1 TERM+LB) is mixed with the Agrobacterium containing only PHP71539 (SEQ ID NO: 184), both Agrobacterium strain suspensions first being adjusted to an OD of 0.4 (550 nm) and then mixed at a ratio of 90% PHP71539 alone (SEQ ID NO: 184) to 10% RV025340 (SEQ ID NO: 193)+PHP71539 (SEQ ID NO: 184). In a fourth treatment, a second Agrobacterium containing PHP71539 (SEQ ID NO: 184)+PHP91539 (SEQ ID NO: 194) (RB+3×ENH::ZM-PLTP PRO::ZM-WUS2::IN2-1 TERM+ZM-PLTP1 PRO::ZM-ODP2::OS-T28 TERM+NOS PRO::CRC::SB-GKAF TERM+LB) is mixed with the Agrobacterium containing only PHP71539 (SEQ ID NO: 184), both Agrobacterium strain suspensions first being adjusted to an OD of 0.4 (550 nm) and then mixed at a ratio of 90% PHP71539 alone (SEQ ID NO: 184) to 10% PHP91539 (SEQ ID NO: 194)+PHP71539 (SEQ ID NO: 184). After the 15-minute liquid infection treatment, the immature embryos are removed from the liquid medium and transferred onto solid medium 562V and oriented scutellum-side up for culture at 21° C. in the dark overnight.

[0404] For all four treatments, fifty (50) immature embryos of maize inbred PH1V69 are infected. In the (control) first treatment containing the virulence plasmid PHP71539 (SEQ ID NO: 184) (with no T-DNA), it is expected that the treated immature embryos will produce a low number of non-transgenic plants germinated from scutellum-derived somatic embryos. For the fifty (50) immature embryos infected in the second treatment with a mixture of Agrobacterium strains in the ratio 90% PHP71539 (SEQ ID NO: 184) to 10% PHP88158 (SEQ ID NO: 182)+PHP71539 (SEQ ID NO: 184), it is expected that the number of R0 plants from each of the infected immature embryos will increase substantially. The improvement in the final number of non-transgenic plants represents a substantial improvement in micro-propagation production of non-transgenic plants that are then ready for transfer to the greenhouse. In the third treatment with a mixture of Agrobacterium strains in the ratio 90% PHP71539 (SEQ ID NO: 184) to 10% RV025340 (SEQ ID NO: 193) (RB+UBI PRO::CFP::PINII TERM+3×ENH::ZM-PLTP PRO::ZM-ODP2::IN2-1 TERM+LB)+PHP71539 (SEQ ID NO: 184), the number of R0 plants produced is expected to be higher than of the (control) first treatment with PHP71539 alone (SEQ ID NO: 184). In the fourth treatment with a mixture of Agrobacterium strains in the ratio 90% PHP71539 (SEQ ID NO: 184) to 10% PHP71539 (SEQ ID NO: 184)+PHP91539 (SEQ ID NO: 194) containing both PLTP::WUS2 and PLTP1::ODP2 it is expected that the number of R0 plants produced will be as high as the number of R0 plants produced in the second treatment (a mixture of Agrobacterium strains in the ratio 90% PHP71539 (SEQ ID NO: 184) to 10% PHP71539 (SEQ ID NO: 184)+PHP88158 (SEQ ID NO: 182)). The final molecular analysis is expected to confirm that the plants generated by this method are non-transgenic, containing no T-DNA with the morphogenic expression cassette(s) and no Agrobacterium plasmid backbone sequences (present in both plasmids).

[0405] b) Experiment 2. Maize inbred PH1V69 immature embryos were harvested, transformed using Agrobacterium, and cultured, as described above in Experiment 1 of this Example 18. Results for the four treatments are summarized in FIGS. 11-14.

[0406] In the (control) first treatment (FIG. 11), fifty (50) immature embryos of maize inbred PH1V69 were infected with the Agrobacterium, with a total of forty (40) producing no response (zero (0) R0 plants). Of the remaining ten (10) immature embryos, nine (9) each produced one (1) R0 plant, while one (1) immature embryo produced four (4) R0 plants. Tabulating the total R0 plants produced (13) relative to the total number of starting immature embryos (50) resulted in a total R0 propagation frequency of 26% (13 R0 plants/50 embryos).

[0407] In the second treatment (FIG. 12), where the second Agrobacterium contained PHP71539 (SEQ ID NO: 184) and PHP88158 (SEQ ID NO: 182) (RB+3×ENH::ZM-PLTP PRO::ZM-WUS2::IN2-1 TERM+NOS PRO::CRC::SB-GKAF TERM+LB), a total of fifty (50) maize immature embryos were infected, with a total of eleven (11) immature embryos producing no R0 plants. For the remaining immature embryos in this treatment, the number of R0s produced/embryo were fourteen (14) starting embryos each produced one (1) R0 plant, eighteen (18) starting embryos each produced two (2) R0 plants, four (4) starting embryos each produced three (3) R0 plants, two (2) starting embryos each produced four (4) R0 plants, and one (1) starting embryo each produced seven (7) R0 plants. For this treatment, a total of seventy-seven (77) R0 plants were produced for a R0 propagation frequency of 154% (77 R0 plants/50 embryos).

[0408] In the third maize treatment (FIG. 13), where the second Agrobacterium containing PHP71539 (SEQ ID NO: 184) and RV025340 (SEQ ID NO: 193) (RB+UBI PRO::CFP::PINII TERM+3×ENH::ZM-PLTP PRO::ZM-ODP2::IN2-1 TERM+LB) a total of fifty (50) maize immature embryos were infected, with a total of thirty-nine (39) immature embryos producing no R0 plants. Of the remaining eleven (11) immature embryos, eight (8) immature embryos each produced one (1) R0 plant, two (2) embryos each produced two (2) plants, and one (1) immature embryo produced three (3) R0 plants. For this treatment, a total of 15 R0 plants were produced resulting in a R0 propagation frequency of 30% (15 R0 plants/50 embryos).

[0409] In the fourth treatment for maize (FIG. 14), in which the second Agrobacterium contained PHP71539 (SEQ ID NO: 184)+PHP91539 (SEQ ID NO: 194) (RB+3×ENH::ZM-PLTP PRO::ZM-WUS2::IN2-1 TERM+ZM-PLTP1 PRO::ZM-ODP2::OS-T28 TERM+NOS PRO::CRC::SB-GKAF TERM+LB), the R0 plant propagation rate was again greatly simulated. In this treatment, of fifty (50) PH1V69 immature embryos treated with the Agrobacterium mixture, only six (6) embryos produced no R0 plants. Of the remaining forty-four (44) starting immature embryos, eleven (11) immature embryos each produced one (1) R0 plant, fifteen (15) immature embryos each produced two (2) R0 plants, ten (10) immature embryos each produced three (3) R0 plants, five (5) immature embryos each produced four (4) R0 plants, one (1) immature embryo produced five (5) R0 plants, one (1) immature embryo produced six (6) R0 plants, and one (1) immature embryo produced seven (7) R0 plants. For this treatment, a total of one hundred nine (10)9 R0 plants were produced from the fifty (50) starting immature embryos, for a R0 plant propagation frequency of 218% (109 R0 plants/50 embryos).

[0410] As summarized in Tables 22 and 23, the substantial improvement in R0 plant propagation observed in all three morphogenic gene treatments is summarized in terms of total R0 propagation frequency (relative to the starting number of immature embryos) in Table 22 and is presented as the fold-increase relative to the control treatment in Table 23.

[0411] All R0 plants produced in this experiment were sampled for qPCR analysis, to determine the copy number of sequences internal to the T-DNA of the second Agrobacterium, or a sequence found only in the Agrobacterium plasmid backbone (VIRG—which was present in both the first and second Agrobacterium strains). For all four treatments, molecular analysis confirmed that all maize R0 plants generated by this method were non-transgenic, containing no T-DNA with the morphogenic expression cassette(s) and no Agrobacterium plasmid backbone sequences (with the helper plasmid backbone having been present in both the first and second Agrobacterium).

### Example 19: Using T-DNA Plasmids with Different Origins of Replication for Modulating Plasmid Copy Number

[0412] For these experiments, two different T-DNAs are delivered in varying ratios (relative to each other) from a single bacterial cell by harboring these T-DNAs on two plasmids with different origins of replication (ORI). The different ORIs vary in the number of the plasmids maintained with a bacterial cell. The different ORIs can be used for titrating the plasmid copy numbers to achieve different ratios of the plasmids in the same bacterial cell. In this experiment one designs a plasmid having one or more ORI selected from the following ORIs: BBR1 ORI; PSA ORI; PSA+PARDE ORI; PVS1 ORI; repABC ORI; RK2 ORI; RK2+PARDE ORI; or RSF1010 ORI (see Table 25) residing within the same bacterial cell. Within these various ORIs, it was previously determined that pVS1 confers high plasmid copy number (˜20 copies/cell) and repABC confers low copy number (˜1-2 copies/cell) in Agrobacterium.

TABLE 25

| SEQ ID | |
|---|---|
| NO: | DESCRIPTION |
| 195 | BBR1 ORI; Agrobacterium tumefaciens |
| 196 | PSA ORI; Agrobacterium tumefaciens |
| 197 | PSA + PARDE ORI; Agrobacterium tumefaciens |
| 198 | PVS1 ORI; Agrobacterium tumefaciens |
| 199 | repABC ORI; Agrobacterium tumefaciens |
| 200 | RK2 ORI; Agrobacterium tumefaciens |
| 201 | RK2 + PARDE ORI; Agrobacterium tumefaciens |
| 202 | RSF1010 ORI; Agrobacterium tumefaciens |

[0413] To validate this concept, a first plasmid is constructed with an ORI that results in high plasmid copy number (pVS1) and a T-DNA that contains trait gene expression cassettes such as ZS-GREEN and HRA. A second plasmid is constructed with an ORI that results in low copy number (repABC) and a T-DNA that contains a morphogenic gene expression cassette (WUS2). Both plasmids are introduced into a single Agrobacterium. When the plasmids residing within the same bacterial cell are co-delivered into the same plant cell, the relative ratio of delivered T-DNAs will reflect the stable ratio of these plasmids in the Agrobacterium.

[0414] In this manner, a similar effect is produced when compared to the method of mixing two different Agrobacteria containing either a trait gene expression cassette T-DNA or a morphogenic gene expression cassette T-DNA (i.e., in a 90%/10% mixture of Agrobacterium 1 and Agrobacterium 2). Like the Agrobacterium mixing method, delivery of plasmid mixtures from the same bacterial strain can result in a higher frequency of cells receiving both T-DNAs and permit a higher transformation frequency. When used for transformation, it is expected that a higher frequency of rapidly forming somatic embryos and resultant TO plants containing a single copy trait gene expression cassette T-DNA with no vector (plasmid) DNA and without integration of morphogenic gene expression cassette T-DNA will be produced.

### Example 20: Generating Clonal Doubled Haploids from a Non-Responsive Microspore-Derived Cell

[0415] In Example 12, a method useful for improving microspore embryogenesis in cells originating from a responsive maize inbred line was shown. For that method, the improved embryogenesis was observed in response to an Agrobacterium containing an expression cassette operably linked to the Z. mays PLTP promoter, a relatively strong promoter in a cell having an embryogenic cell fate and a relatively weak activity in a cell having a non-embryogenic cell fate.

[0416] While it was shown that the method in Example 12 can improve microspore embryogenesis in a microspore-derived cell isolated from a responsive line, that method was not observed to equally improve microspore embryogenesis in a microspore-derived cell isolated from a non-responsive line (data not shown). Hence, there remains a need to further improve methods useful for inducing microspore embryogenesis in a genotype-independent manner, notably for maize inbreds with recalcitrant microspore embryogenesis phenotypes.

[0417] The methods of the present disclosure describe a method to treat multicellular structures derived from a cultured microspore isolated form a recalcitrant inbred line using an Agrobacterium containing an expression cassette operably linked a promoter with relatively strong activity in a cell having a partial, or non-embryogenic cell fate.

[0418] Promoters of interest to the current method are regulatory elements comprising promoter sequences known to be active in plant cells, including but not limited to “constitutive” or “inducible” plant promoters, such as promoters listed in Tables 4 and 5. Such regulatory elements can include polynucleotide sequences encoding EMEs disclosed in Table 6 and or sequences encoding translation or transcription enhancers disclosed in Table 7.

[0419] Of interest to the present disclosure are regulatory elements comprising a promoter sequence with relatively strong promoter activity in a paternal gamete cell. Examples of promoter sequences useful in the present disclosure are listed in Table 26 below.

TABLE 26

| | | | DNA |
|---|---|---|---|
| | | | SEQ ID |
| Identifier: | Name | Source | NO: |
| dpzm03g024500 | RmlC-like cupin | Zea mays | 318 |
| PRO | | | |
| dpzm09g008400 | Ubiquitin | Zea mays | 319 |
| PRO | | | |
| dpzm01g090870 | Tubulin alpha-1 | Zea mays | 320 |
| PRO | | | |
| dpzm06g001180 | [frk2] fructokinase 2 | Zea mays | 321 |
| PRO | | | |
| dpzm08g032600 | 40S ribosomal protein | Zea mays | 322 |
| PRO | S26-2-like | | |
| dpzm04g059940 | 40S ribosomal protein | Zea mays | 323 |
| PRO | S15a-1-like | | |
| dpzm05g051270 | Cyclophilin type peptidyl- | Zea mays | 324 |
| PRO | prolyl cis-trans isomerase | | |
| dpzm08g051700 | Ribosomal protein L5 | Zea mays | 325 |
| PRO | eukaryotic/L18 archaeal | | |
| dpzm02g070510 | 40S ribosomal protein SA-like | Zea mays | 326 |
| PRO | | | |
| dpzm03g044630 | Ribosomal protein L5 | Zea mays | 327 |
| PRO | eukaryotic/L18 archaeal | | |
| dpzm04g015310 | Ferredoxin-1 | Zea mays | 328 |
| PRO | | | |
| dpzm08g002650 | 40S ribosomal protein S5-like | Zea mays | 329 |
| PRO | | | |
| dpzm06g003090 | WPP domain-associated protein-like | Zea mays | 330 |
| PRO | | | |
| dpzm07g039000 | 60S ribosomal protein L14-1-like | Zea mays | 331 |
| PRO | | | |
| dpzm03g034880 | 40S ribosomal protein S9-2-like | Zea mays | 332 |
| PRO | | | |
| dpzm05g006980 | [tua4] alpha tubulin4 | Zea mays | 333 |
| PRO | | | |
| dpzm06g001500 | [arpp1a] acidic ribosomal protein | Zea mays | 334 |
| PRO | | | |
| dpzm01g081700 | 60S ribosomal protein L10-like | Zea mays | 335 |
| PRO | | | |
| dpzm06g001640 | 40S ribosomal protein S13-like | Zea mays | 336 |
| PRO | | | |
| dpzm07g047460 | Translation elongation factor EF1B | Zea mays | 337 |
| PRO | | | |
| dpzm04g016000 | 60S acidic ribosomal protein P1-like | Zea mays | 338 |
| PRO | | | |
| dpzm06g038090 | 60S ribosomal protein L18-3-like | Zea mays | 339 |
| PRO | | | |
| dpzm03g050170 | 40S ribosomal protein S23-like | Zea mays | 340 |
| PRO | | | |
| dpzm08g032890 | 60S ribosomal protein L24-like | Zea mays | 341 |
| PRO | | | |
| dpzm02g017130 | 60S ribosomal protein L23a-like | Zea mays | 342 |
| PRO | | | |

[0420] Another promoter sequence providing a high level of specificity for expression in developing pollen, particularly at the mid-uninucleate stage is the P67 promoter (see patent U.S. Pat. No. 7,915,398 B2 incorporated herein by reference in its entirety) that can be used in the methods of the present disclosure for treatment of a paternal gametic cell derived from a non-responsive inbred line. In this construct, the T-DNA polynucleotide replaces the ZM-PLTP promoter sequence used in plasmid RV020636 (SEQ ID NO: 186) with the P67 promoter sequence (named ZM-PME10 PRO in RV038288), resulting in plasmid RV038288 (SEQ ID NO: 185).

[0421] In the present disclosure, it is of interest to transform plasmid RV038288 into an Agrobacterium strain that is an auxotroph, for example a conditional thymidine auxotrophic mutant (Thy A−) auxotroph, and or a strain that co-expresses a gene conferring conditional negative selection, for example using the bacterial cytosine deaminase (codA) gene, as described in Example 11.

[0422] In this method, embryogenic growth is stimulated in a non-transformed, microspore-derived cell in response to WUSCHEL protein activity provided by a first cell containing a T-DNA from plasmid RV038288. Further, expressing the WUSCHEL protein from the T-DNA becomes lethal to the first cell, particularly when using said conditional negative selection methods, thereby conferring improved microspore embryogenesis to a non-transformed, microspore-derived cell while selecting against a cell with a T-DNA. Thus, the current method can be used for generating a microspore-derived doubled haploid plant. More preferentially, said method can generate clonal, microspore-derived doubled haploid plants from a treated tissue.

[0423] For treatment, the tissue of interest is a multicellular structures (MCS) obtained using the methods described in Example 12, particularly using cell cultures from a maize line that is less responsive than ATCC40520.

[0424] Agrobacterium-mediated transformation of MCS cells is performed as described in Example 12, here using two Agrobacterium strains in a combined mixture (e.g. 95% PHP86491 & 5% RV038288). The filtered MCS and Agrobacterium mixture are combined in a suspension using 0.5 mL of the suspended MCS cells and 0.5 mL combined Agrobacterium mixture, allowed to incubate for 5 minutes under sterile conditions, transferred to a solid medium (e.g. 605J), and incubated under dark conditions at 21° C. After 24 hours, each plate was transferred to 28° C. and incubated under dark conditions.

[0425] Preferentially, the method can be practiced as described in Example 12, including the use of a chromosome doubling treatment. Proliferating callus tissue can be transferred to a maturation medium with selection, for example 289Q medium supplemented with 5-fluorocytosine. Optionally, conditional selection methods can also be practiced during or after proliferating callus tissue of each treated microspore-derived embryo is dissected. For example, by transferring of each portion of dissected tissue being transferred to maturation medium (289Q) supplemented with 5-fluorocytosine and cultured at 26-28° C. under dark conditions.

[0426] It is also envisioned that co-expression of more than one morphogenic developmental gene can improve the microspore embryogenesis response in a genotype-independent manner, for example by providing both WUSCHEL and BABYBOOM/ODP2 protein activities to a microspore-derived cell. Other such proteins useful for the present disclosure can include but are not limited to other morphogenic developmental genes, such as LEC1 and or a geminivirus RepA gene.

[0427] This method is expected to improve the capability to regenerate a paternally-derived doubled haploid plant from a cultured maize microspore.

[0428] It is expected that a microspore embryogenic response for a cell derived from a specific genotype can be improved by using specific combinations of EMEs and or translation or transcription enhancers within the polynucleotide sequences of the regulatory elements.

[0429] It is expected that microspore embryogenic responses can be further improved by providing to a microspore-derived cell one or more other morphogenic developmental gene activities to a cell, for example by co-expressing two or more morphogenic developmental genes, particularly in combinations as needed to promote microspore embryogenic responses in a genotype-dependent manner.

### Example 21: Regenerating Plants Using Somatic Embryos Derived from Diploid Maize Cells Containing a Pre-Existing Integrated Transgene

[0430] Examples 5-7 describe novel plant breeding methods using maternal haploid embryos, Examples 12 and 20 describe utility of novel methods towards plant breeding using paternal haploid microspores, and Example 18 describes methods improving the regeneration of plants by treating non-transgenic diploid embryos. Specifically, the methods of Example 18 provide capabilities for obtaining non-transgenic plants that contain no T-DNA with the morphogenic expression cassette(s) and no Agrobacterium plasmid backbone sequences (present in both plasmids).

[0431] In the method of the present disclosure, methods for obtaining a clonal plant is described wherein the initial plant cell contains a stably integrated T-DNA, and thus is considered a transgenic plant cell, that is treated to produce somatic embryos capable of regenerating clonal, transgenic plants. Notably, said transgenic plants contain only the original stably integrated T-DNA and contain no T-DNA with the morphogenic expression cassette(s) and no Agrobacterium plasmid backbone sequence (present in any plasmids).

[0432] Maize embryos are prepared as described above. Agrobacterium strain LBA4404 THY− containing the virulence plasmid PHP71539 (SEQ ID NO: 184) is used in all treatments. In the first treatment, PHP71539 (SEQ ID NO: 184) containing no T-DNA is adjusted to an OD of 0.4 (550 nm) in liquid 700A medium, and immature maize embryos are added to the Agrobacterium suspension for 15 minutes at room temperature (25° C.). In the second treatment, a second Agrobacterium containing both PHP71539 (SEQ ID NO: 184) and PHP88158 (SEQ ID NO: 182) (RB+3×ENH::ZM-PLTP PRO::ZM-WUS2::IN2-1 TERM+NOS PRO::CRC::SB-GKAF TERM+LB) is mixed with the Agrobacterium containing PHP71539 (SEQ ID NO: 184), both Agrobacteria suspensions first being adjusted to an OD of 0.4 (550 nm) and then mixed at a ratio of 90% PHP71539 (SEQ ID NO: 184) to 10% PHP88158 (SEQ ID NO: 182)+PHP71539 (SEQ ID NO: 184). In a third treatment, a second Agrobacterium containing PHP71539 (SEQ ID NO: 184) and RV025340 (SEQ ID NO: 193) (RB+UBI PRO::CFP::PINII TERM+3×ENH::ZM-PLTP PRO::ZM-ODP2::IN2-1 TERM+LB) is mixed with the Agrobacterium containing PHP71539 (SEQ ID NO: 184), both Agrobacteria suspensions first being adjusted to an OD of 0.4 (550 nm) and then mixed at a ratio of 90% PHP71539 (SEQ ID NO: 184) to 10% RV025340 (SEQ ID NO: 193) and PHP71539 (SEQ ID NO: 184). In a fourth treatment, a second Agrobacterium containing PHP71539 (SEQ ID NO: 184)+PHP91539 (SEQ ID NO: 194) (RB+3×ENH::ZM-PLTP PRO::ZM-WUS2::IN2-1 TERM+ZM-PLTP1 PRO::ZM-ODP2::OS-T28 TERM+NOS PRO::CRC::SB-GKAF TERM+LB) is mixed with the Agrobacterium containing PHP71539 (SEQ ID NO: 184), both Agrobacteria suspensions first being adjusted to an OD of 0.4 (550 nm) and then mixed at a ratio of 90% PHP71539 (SEQ ID NO: 184) to 10% PHP91539 (SEQ ID NO: 194) and PHP71539 (SEQ ID NO: 184). After the 15-minute liquid infection treatment, the immature embryos are removed from the liquid medium and transferred onto solid medium 562V and oriented scutellum-side up for culture at 21° C. in the dark overnight.

[0433] For all four treatments, 50 immature embryos of a maize line PH1V69 containing a stably integrated T-DNA, herein referred to as a transgenic “trait”, are infected with Agrobacterium. In the first treatment containing the virulence plasmid PHP71539 (SEQ ID NO: 184) (with no T-DNA), it is expected that the treated immature embryos will produce a low number of plants from scutellum-derived somatic embryos. For the fifty (50) immature embryos infected with a mixture of Agrobacterium strains in the ratio 90% PHP71539 (SEQ ID NO: 184) to 10% PHP88158 (SEQ ID NO: 182) and PHP71539 (SEQ ID NO: 184), it is expected that the number of derived plants from each of the infected immature embryos will increase substantially. The final number of clonally derived plants represents a substantial improvement in propagating plants, here containing the stably integrated T-DNA (e.g. a transgenic “trait”). In the treatment with RV025340 (SEQ ID NO: 193) RB+UBI PRO::CFP::PINII TERM+3×ENH::ZM-PLTP PRO::ZM-ODP2::IN2-1 TERM+LB, the number of produced plants is expected to be higher than for the first treatment with PHP71539 (SEQ ID NO: 184) alone, and the final treatment with PHP71539 (SEQ ID NO: 184)+PHP91539 (SEQ ID NO: 194) containing both PLTP::WUS2 and PLTP1::ODP2 will be as high as the PHP71539 (SEQ ID NO: 184)+PHP88158 (SEQ ID NO: 182) treatment.

[0434] The final molecular analysis is expected to confirm that the plants generated by this method are transgenic regarding only the first, stably integrated T-DNA (e.g. a transgenic “trait”) while containing no T-DNA with a morphogenic expression cassette(s) and no Agrobacterium plasmid backbone sequences (present in both plasmids).

### Example 22: Regenerating Plants Using Somatic Embryos Derived from Diploid Maize Cells Containing a Pre-Existing Genome Modification

[0435] Examples 5-7 describe novel plant breeding methods using maternal haploid embryos, Examples 12 and 20 describe utility of novel methods towards plant breeding using paternal haploid microspores, and Example 18 describes methods improving the regeneration of plants by treating non-transgenic diploid embryos. Specifically, the methods of Example 18 provide capabilities for obtaining non-transgenic plants that contain no T-DNA with the morphogenic expression cassette(s) and no Agrobacterium plasmid backbone sequences (present in both plasmids). Conversely, Example 21 describes methods for obtaining a clonal plant wherein the initial plant cell contains a stably integrated T-DNA, and thus is considered a transgenic plant cell, that is treated to produce somatic embryos capable of regenerating clonal, transgenic plants.

[0436] The method of the present disclosure describes methods for obtaining a clonal plant wherein the initial plant cell's genome contains a targeted genome modification resultant from previous activity of a programmable, site directed nuclease. Such genome modifications can be modifications comprising repair of a double strand break (DSB) without the addition a repair template, for example causing a deletion of DNA base pair(s), a SDN-1 method; non-homologous end joining repair of a DSB caused by cleavage at two target sites, for example a gene “knock-out”, a SDN-2 method; or a DSB at a target site in the genomic DNA accompanied by a homology directed repair using a template containing a gene or other sequence of genetic material that is transferred into the DSB target site and repaired using the cell's natural repair process exemplifies gene targeting, a SDN-3 method.

[0437] It is expected a capability for regenerating clonal plants using somatic embryos derived from diploid maize cells containing a pre-existing genome modification can achieved using the methods as described in Example 21

[0438] The final molecular analysis is expected to confirm that the plants generated by this method are genome modified regarding only site directed modifications while containing no T-DNA with a morphogenic expression cassette(s) and no Agrobacterium plasmid backbone sequences (present in both plasmids).

### Example 23: Using FLP-Mediated SSI with Altruistic Micropropagation in a Haploid Embryo Rapidly Produced Clonal Fixed SSI Events

[0439] Pioneer inbred PH184C containing a transgenic locus is used as the Site-Specific Integration (SSI) target line, the transgenic target locus contains RB+UBI1ZM PRO::UBI1ZM INTRON1::FRT1::PMI::PINII TERM+FRT6+LB. This inbred line, homozygous for the target locus, is pollinated with a haploid-inducer line to produce haploid embryos. Immature ears are harvested from PH184C and 2.0 mm immature embryos are extracted from the kernels on the day of Agrobacterium-mediated transformation and based on both anthocyanin and fluorescent markers the embryos are sorted to enrich for only haploid embryos.

[0440] Two Agrobacterium “strains” are prepared for transformation, one strain (Agro1) being transformed with a plasmid PHP88158 (SEQ ID NO: 182) in which the T-DNA contains RB+FMV ENH:PSCV ENH:MMV ENH:ZM-PLTP PRO::ZM-WUS2::IN2-1 TERM+NOS PRO::CRC::SB-GKAF TERM+LB, and the second (Agro2) being transformed with a T-DNA-containing plasmid (PHV00003) (SEQ ID NO: 345) with the configuration RB+UBI1ZM PRO::UBI1ZM INTRON1::FLPM-EXON1::ST-LS1 INTRON2-V2::FLPM-EXON2::PINII+FRT1+NPTI::PINII TERM+UBI1ZM PRO::UBI1ZM INTRON1::DS-RED2 (ALT1)::PINII TERM+FRT6+LB. Thus, Agro1 will deliver a T-DNA with an altruistic WUS cassette which will stimulate somatic embryo formation, and Agro2 will deliver a T-DNA with a FLP recombinase expression cassette+the SSI donor sequence+a DS-RED2 marker sequence. The two Agrobacterium strains are streaked onto fresh culture plates as previously described and cultured overnight.

[0441] Freshly isolated haploid embryos are placed in 700A medium until all the haploid embryos are harvested and ready for transformation. The two Agrobacterium strains are collected from the solid plates on which they grew overnight and resuspended in 700A liquid medium. The density of both strains is adjusted to OD500 nm=0.4, and then the two strains are mixed at a ratio of 10% Agro1 (WUS) to 90% Agro2 (SSI-donor). The embryos are then suspended in the Agrobacterium mixture, gently inverted twice to mix the suspension, and then left at room temperature for 15 minutes for initial Agrobacterium infection to occur. The suspension (containing the Agrobacterium-mixture and the leaf tissue) is poured through a sterile stainless-steel mesh to collect the leaf tissue, and this tissue is then transferred onto a filter paper resting on the surface of fresh culture medium (resting medium with no selection). At the end of the resting stage, the filter paper supporting the leaf segments is transferred onto culture medium containing 150 mg/l G418. After 2-weeks selection, newly-formed somatic embryos are transferred onto maturation medium to stimulate shoot formation, and finally the shoots are transferred onto rooting medium for 2 weeks before the plantlets can be transferred to soil in the greenhouse.

[0442] At the plantlet stage, leaf tissue is sampled for PCR analysis to confirm that the genes within the flanking FRT1 and FRT6 sites of the original target locus are no longer present and that the new genes within the donor cassette have recombined into the target locus correctly—and precise RMCE (Recombinase-Mediated Cassette Exchange) events are identified. Using this method, it is anticipated that i) SSI events are recovered at a frequency greater than 5% (based on the number of confirmed SSI TO plants relative to the starting number of immature embryos), ii) use of the altruistic WUS Agrobacterium results in rapid proliferation of SSI+ somatic embryos and germination to form multiple clonal SSI+ T0 plants, and iii) that due to colchicine-induced doubling early in the process after successful SSI, many SSI+ T0 plants are homozygous for the recombined SSI locus.

### Example 24: Methods Improving Regeneration of Amphiploid Plants

[0443] Wide hybridization is a plant breeding tool, including both interspecific and intergeneric hybridization, used to produce a hybrid from a cross of related species or genera that do not normally sexually reproduce with each other, herein referred to as a ‘wide cross’. Wide hybridization is the first step to introduce and transfer desirable trait(s) from a wild species, often referred to as an ‘alien’ species, into a cultivated species lacking a favorable phenotype for said trait(s).

[0444] Introgression has two key steps: sexual hybridization to bring the wild or ‘alien’ genome into a cultivated background and homologous and/or homoeologous recombination to eliminate or replace the deleterious alleles and/or genes causing a reduction in fitness in a cultivated species. However, deleterious genes introgressed along with the beneficial gene transferred from a wild, ‘alien’ species can occur. Thus, a major disadvantage when using wild genetic resources is that amphiploids, the first-generation hybrid containing a diploid set of chromosomes from both parents, can have reduced fitness due to deleterious genes transferred from ‘alien’ species as reported in the art.

[0445] For this reason, backcrossing is often performed, wherein an amphiploid is crossed to the cultivated species to obtain offspring with a genetic identity closer to that of the cultivated species parent. In each back-cross generation, the beneficial gene from the ‘alien’ genome is maintained, while a gene conferring an unfavorable trait(s) is selected against. Recombination is required during each generation to obtain novel recombinants to ‘break’ such linkage between genes conferring beneficial and unfavorable traits. Multiple generations of backcrossing are typically performed using the cultivated species as the ‘recurrent’ parent to obtain a plant possessing the original agronomic fitness of the cultivated species with, ideally, only the introgressed gene(s) transferred from the ‘alien’ species conferring improved phenotypic performance for said trait(s).

[0446] Thus, the phenotypic diversity of landraces, local cultivars and related species are sources of genetic variation useful for crop improvement, and thus, are useful for improving the sustainability of current agricultural production methods. The essential problem in using interspecific hybridization in plant breeding programs, however, is the low probability of obtaining in one individual the desired combination of genes from the parental species. Hence, methods that improve this probability for obtaining the desired outcome are needed in the art.

[0447] Clearly, plant breeding methods are not limited to only the backcrossing method as described above. Other methods can include creating populations such as chromosome segment substitution lines, recombinant chromosome substitution lines, near-isogenic lines, as well as chromosome addition and chromosome translocation lines.

[0448] Furthermore, these aspects are inclusive of a multitude of interspecific and intergeneric hybridization combinations of interest to plant breeding; there is no effort to fully describe all such interests here. Second, it is understood that use of wide hybridization is not a new concept.

[0449] As described herein, a Triticeae example is considered as an exemplary model, given that many synthetic wheats lines have been created using such methods and novel genetic diversity continues being incorporated into wheat breeding programs worldwide. It is also useful given that genetic material for improving such traits is described as a diverse set of Triticeae species comprising primary, secondary, and tertiary gene pools of wheat. These gene pools include wild and cultivated species within the genera Aegilops, Agropyron, Ambylopyrum, Dasypyrum, Elymus, Hordeum, Leymus, Lophopyrum, Psathyrostachys, Pseudoroegneria, Secale, Thinopyrum, and Triticum.

[0450] In relation to a cultivated species, it is believed that the evolutionary distance between two parental lines is proportional to how ‘wide’ a cross is, for example, as characterized by DNA sequence differences at the genomic level.

[0451] Difference at the genomic level are believed to be underlying factors creating barriers affecting the success of using wide cross methods, despite the potential use of existing biodiversity for genetic gain. Examples of such barriers include but are not limited to meiotic pairing characteristics in diploid hybrids, for example, a lack of chromosome pairing, preferential transmission of chromosomes harboring gametocidal genes, hybridization incompatibility due to sterility, and suppressed recombination, typically due to a lack of synteny. As a result, despite some highly significant successes, introgression remains laborious and time consuming, increasingly so as the genetic basis for trait complexity increases, and therefore it is believed that today's cultivated elite crop gene pools contain only a fraction of the available biodiversity.

[0452] Methods for overcoming such barriers include using irradiation to generate translocations and use of gametocidal genes for induced chromosomal breakage. Tissue culture improvements have also been useful in overcoming such barriers.

[0453] Despite such improvements, amphiploid seed can remain defective and fail to germinate under normal conditions. A major, albeit simple, advance in the state of the art was the use of embryo rescue to improve regenerating a plant from an immature amphiploid embryo. When such an amphiploid embryo would otherwise perish after being allowed to further develop as a seed, embryo rescue methods improved the probability for obtaining an amphiploidy plant, and thus greater access to genetic diversity present in other gene pools.

[0454] Of interest to the present disclosure are methods useful for improving or circumventing remaining barriers that restrict or prevent genetic interchange between related plant populations. Here, the present disclosure describes novel improvements to the state of the art, whereby amphiploid embryos are rescued and treated as described herein. For example, amphiploid embryos can be treated using methods in Examples 3, 8, and 16 to 18, to further improve capabilities of regenerating amphiploid plants, including the capability to obtain more than one amphiploid plant per treated immature embryo.

[0455] In the method of the present disclosure, freshly harvested immature seed produced by a wide cross, for example resulting from a wide cross between two Triticeae species, are sterilized with 50% bleach and 0.1% Tween-20 for 30 min under vacuum and then rinsed with sterile water three times. Agrobacterium strain LBA4404 THY− containing the virulence plasmid PHP71539 (SEQ ID NO: 184) is used in all treatments. In the first treatment, PHP71539 (SEQ ID NO: 184) containing no T-DNA is adjusted to an OD of 1.0 (600 nm) in liquid 716B medium, and immature amphiploid embryos are added to the Agrobacterium suspension for 20 minutes at room temperature (25° C.). In the second treatment, a second Agrobacterium containing both PHP71539 (SEQ ID NO: 184) and PHP88158 (SEQ ID NO: 182) (RB+3×ENH::ZM-PLTP PRO::ZM-WUS2::IN2-1 TERM+NOS PRO::CRC::SB-GKAF TERM+LB) is mixed with the Agrobacterium containing only PHP71539 (SEQ ID NO: 184), both Agrobacterium strain suspensions first being adjusted to an OD of 1.0 (600 nm) and then mixed at a ratio of 90% PHP71539 (SEQ ID NO: 184) alone to 10% PHP71539 (SEQ ID NO: 184)+PHP88158 (SEQ ID NO: 182).

[0456] After the 15-minute liquid infection treatment, the immature embryos are removed from the liquid medium and transferred onto solid medium 606 medium and oriented scutellum-side up for culture at 21° C. in the dark overnight. The embryos are transferred again onto fresh resting medium (606) for 10 days, then onto regeneration medium 689E with selection in the dark. The tissue is then moved onto regeneration medium 689E with selection in the light.

[0457] Using the chromosome doubling methods using colchicine as described in Example 6, a treated embryo exposed to a chromosome doubling agent before, during, or after the Agrobacterium co-infection steps can produce one or more first-generation hybrid plants containing a diploid set of chromosomes from both parents, or amphiploid plants. After germination, the plants produced are potted to soil, and the count of clonal plants per treated embryo are recorded.

[0458] Tissue can be collected from a plant and biomolecules such as DNA, RNA, proteins, and or metabolites can be isolated for diagnostic analysis. Such diagnostic methods include, but are not limited, to DNA sequencing methods, DNA polymerase chain reaction amplification, transcript profiling methods, proteomics, metabolomics, and epigenomics, as well we the respective analysis methods supporting each diagnostic method.

[0459] In another aspect, it is conceived that present disclosure can further improve introgression, for example by treating an immature embryo derived from a wide cross that is treated in a manner as described in Example 9. More specifically, the current method provides to a cell contacted by a WUS protein at least one genome modification enzyme and at least one gRNA enabling a target site mutation, for example a genomic target site encoding a deleterious allele within the alien genome. Using the methods of Example 9, wherein the immature embryo is treated with a combination of plasmids as described in Table 18. Here is it conceived that such a method provides an advantage for recovering wide cross hybrids with improved vigor.

[0460] In another aspect, it is conceived the method can be used to provide to a cell contacted by a WUS protein at least one genome modification enzyme and at least one gRNA enabling more than one target site mutation, for example at least one genomic target site within the genome of the cultivated species and at least one genomic target site within the alien species, to promote recombination at such targeted genomic regions. Preferentially, at least two gRNA can be designed for two genomic target sites within the alien species to cause a donor template to be obtained from the genome of the alien species. Thus, it is conceived that such a method provides an advantage to improve the ease and frequency for introgressing genomic DNA from an alien species into a double-strand break site of the cultivated species.

[0461] It is expected that outcomes of this Example 24 will provide an improved capability for obtaining a non-transgenic amphiploid plant from an immature embryo produced by a wide-cross. Preferentially, the plant will contain no T-DNA from the morphogenic expression cassette(s) and no Agrobacterium plasmid backbone sequences. More preferentially, it is expected said method will enable novel capabilities for obtaining clonal, non-transgenic amphiploid plants from an immature wide cross embryo.

[0462] Thus, in one aspect, it is expected that wide hybridization crosses can be obtained with improved efficiencies, and plant breeding programs can more effectively introgress and evaluate novel genetic variants existing in landraces, local cultivars and related species.

[0463] In another aspect, the results of the current method are expected to improve generating and selecting wide cross progeny with a reduced frequency of deleterious alleles. Such a method can be expected to reduce the preferential transmission of chromosomes harboring gametocidal genes. Thus, the method of the present disclosure is expected to improve capabilities for using wild genetic resources in wide crosses.

[0464] In another aspect, the methods of the present disclosure can be used to overcome other barriers to wide cross methods, such as barriers caused by a lack of chromosome pairing, hybridization incompatibility due to sterility, or suppressed recombination caused by a lack of synteny. It is expected that the methods described here for creating a targeted double strand break in the genome of a cultivated species genome while simultaneously providing donor template from an alien species can improve the frequency for recovering wide cross progeny having ‘alien’ introgressions. Such a capability is expected to improve methods for creating populations such as chromosome segment substitution lines, recombinant chromosome substitution lines, near-isogenic lines, as well as chromosome addition and chromosome translocation lines.

[0465] Together, the results of the present disclosure are expected to reduce the amount of time and labor required for breeding methods aiming to widen the breadth of available biodiversity within today's cultivated elite crop gene pools. When combined with other methods of plant breeding, it is furthermore expected that the methods of the present disclosure will increase the probability of obtaining in one individual the desired combination of genes from the parental species used in wide crosses.

### Example 25: Using Nanoparticle-Mediated Delivery for AMP (in Either Immature Embryos or Seedling-Derived Leaf Segments)

[0466] a) Delivery of DNA. Carbon nanotubules are functionalized with plasmid DNA containing a WUS2 expression cassette, by first treating the carbon nanotubules with polyethyleneimine (PEI), and then incubating with plasmid DNA which is attracted to the PEI, effectively binding the DNA to the nanotubule in an irreversible manner. For example, these PEI-functionalized nanotubules are loaded with the plasmid DNA cargo (containing 3×ENH::PLTP::WUS2+UBI::ZS-GREEN expression cassettes) Once DNA is attached, freshly harvested maize immature embryos are suspended in the nanotubule/DNA mixture, and nanotubule/protein complexes move into the plant cell. Upon entry into the plant cell and then into the nucleus, the plasmid-contained genes are expressed to encode both WUS2 and ZS-GREEN protein, stimulating de novo formation of green-fluorescent somatic embryos. The DNA continues to be expressed while still bound and protected by the nanotubule, prolonging the stimulation of green-fluorescent somatic embryo formation.

[0467] b) Delivery of RNA. Carbon nanotubules are functionalized with Wus2 and ZS-GREEN RNA, by first treating the carbon nanotubules with polyethyleneimine (PEI), and then incubating with in vitro-transcribed RNA, effectively binding the RNA to the nanotubule in an irreversible manner. For example, these PEI-functionalized nanotubules are loaded with the RNA cargo (both WUS2 and ZS-GREEN RNAs). Once RNA is attached, freshly harvested maize immature embryos are suspended in the nanotubule/RNA mixture, and nanotubule/protein complexes move into the plant cell. Upon entry into the plant cell and then into the nucleus, the RNAs are transcribed to encode both WUS2 and ZS-GREEN protein, stimulating de novo formation of green-fluorescent somatic embryos. The RNA continues to be expressed while still bound and protected by the nanotubule, prolonging the stimulation of green-fluorescent somatic embryo formation.

[0468] c) Delivery of proteins. Carbon nanotubules are functionalized with protein, either through covalent linkage or non-covalent attractions. For example, the surface of the nanotubules are covalently modified to add functional groups to the surface that can form ester linkages with other organic molecules such as nucleic acids or polypeptides. These functionalized nanotubules are then incubated with proteins such as WUS2. Once protein is attached, freshly harvested maize immature embryos are suspended in the nanotubule/protein liquid, and nanotubule/protein fusions move into the plant cell. Upon entry into the plant cell, endogenous esterase proteins cleave the ester linkage between the WUS2 proteins and the nanotubules resulting in release of the protein for diffusion into the nucleus and transcriptional regulation of other genes to stimulate de novo somatic embryo formation.

[0469] d) The flexibility of nanotubule delivery for simultaneous Cas9-mediated genome editing and WUS2/ODP2 stimulation of somatic embryo formation results in rapid production of clonally-propagated edited plants. Using variations of the above treatments, mixtures of nanotubules pre-loaded with DNA, RNA, proteins, or Ribonucleoproteins (RNPs) are used.

### Example 26: Use of Nanotubule Delivery of FLP, the RMCE Donor Cassette, and the WUS Gene for Site-Specific Integration

[0470] Carbon nanotubules are functionalized with i) plasmid DNA containing a SSI donor sequence, ii) a plasmid with a FLP recombinase expression cassette, and iii) a plasmid containing a WUS2 expression cassette, by first treating the carbon nanotubules with polyethyleneimine (PEI), and then incubating with plasmid DNA which is attracted to the PEI, effectively binding the DNA to the nanotubule in an irreversible manner. For example, the SSI donor sequence within plasmid PHV00002 (SEQ ID NO: 344) contains FRT1+NPTII::PINII TERM+UBI1ZM PRO::UBI1ZM INTRON1::ZS-GREEN1::PINII TERM+FRT6, the FLP recombinase plasmid contains the expression cassette ZM1UBI PRO::FLPm::PINII TERM (PHV00004, SEQ ID NO: 346), and the WUS2 plasmid contains 3×ENH::PLTP PRO::WUS2::IN2-1 TERM (PHV00005, SEQ ID NO: 347). For each of these three plasmids, a separate aliquot of the PEI-functionalized nanotubules are loaded with one plasmid DNA cargo for each batch of particles. Once the plasmids are attached, the three nanotubule/plasmid complexes can be mixed together in different ratios to determine the optimal ratio for optimal frequencies of site-specific integration.

[0471] Freshly harvested maize immature embryos of an inbred containing a pre-integrated Recombination Target Site (i.e. RTL-45 on chromosome 1, with ZM1UBI PRO::PMI::PINII TERM+ZM1UBI PRO::AM-CYAN::PINII TERM) are harvested. The immature embryos are then suspended in the nanotubule/DNA mixture (containing a mixture of DONOR:FLP:WUS2 plasmids at a molar ratio of 45:45:10, respectively) and nanotubule/DNA complexes move into the plant cell. Upon entry into the plant cell and then into the nucleus, the plasmid-contained expression cassettes encode both FLP and WUS2 protein, with FLP catalyzing Recombinase-Mediated Cassette Exchange (RMCE) between the donor plasmid and the RTL-45 target site, and WUS2 stimulating de novo formation of somatic embryos. The DNA continues to be expressed while still bound and protected by the nanotubule, prolonging the opportunity for successful SSI and somatic embryo propagation. Since the DNA delivered by the nanotubules is not released, random integration does not occur.

### Example 27: Delivery of Cas9, gRNA and New Templates for Recombination Target Locus into Haploid Embryos to Rapidly Produce New SSI Target Sites in New Elite Inbreds

[0472] An Agrobacterium strain LBA4404 THY− containing a T-DNA with components for Cas9-mediated homology directed repair (HDR) is used. The T-DNA contains RB+LOXP+AXIG1::WUS2::IN2-1 TERM+PLTP::ODP2::PINII TERM::CZ19B1 TERM+ZM1UBI PRO::ZM1UBI 5UTR::ZM1UBI INTRON1::NLS::CAS9 EXON1::ST-LS1 INTRON2::CAS9 EXON2::VIRD2 NLS::PINII TERM+ZM-U6 POLIII CHR8 PRO::ZM-CHR1-52.56-8CR1::GUIDE RNA::ZM-U6 POLIII CHR8 TERM+ZM-HSP18A PRO::MO-CRE EXON1::ST-LS1 INTRON2::MO-CRE EXON2::PINII TERM+HR1+LOXP+ZM1UBI PRO::FRT1::NPTII::PINII TERM+FRT6+HR2+LB (PHV00007, SEQ ID NO: 348). HR1 and HR2 represent homology arms in the elite genome HDR-target site, where Cas9 cut-sites are positioned just proximal to each homology arm. Upon Agrobacterium-mediated transformation and Cas9-mediated HDR, the template HR1+LOXP+ZM1UBI PRO::ZM1UBI 5UTR::ZM1UBI INTRON1::FRT1::NPTII::PINII TERM+FRT6+HR2 (PHV00008, SEQ ID NO: 349) is cut from the T-DNA locus and integrated into the elite inbred target site via homology-dependent recombination. After a 10-day resting period, the immature embryos are exposed to a heat treatment of 45° C. for two hours. Chromosome doubling and clonal propagation of the transgenic event results in a new elite inbred that is now homozygous for the Recombination Target Site (RTL) which can be used for site-specific integration at high efficiency.

### Example 28: Particle Bombardment

[0473] Prior to bombardment, ten (10) to twelve (12) days after pollination (DAP) immature embryos were isolated from ears of the Pioneer inbred PH184C and placed on culture medium plus 16% sucrose for three (3) hours to plasmolyze the scutellar cells.

[0474] Different types of plasmids were typically used for each particle bombardment depending on the desired outcome: 1) a plasmid containing a morphogenic gene expression cassette such as 3×ENH::PLTP::WUS2::In2-1 (PHV00005, (SEQ ID NO: 347)) that stimulates embryo formation in neighboring or adjacent cells; 2) a plasmid containing the expression cassette UBI PRO::FLPm::pinII (PHV00004, (SEQ ID NO: 346)) and a second plasmid containing the FRT-flanked donor cassette for Recombinase-Mediated Cassette Exchange (PHV00002, (SEQ ID NO: 344)); or 3) a plasmid containing an expression cassette UBI PRO::CAS9::pinII (PHV00009, (SEQ ID NO: 352)) and an expression cassette with U6 PRO:gRNA::U6 TERM (PHV00010, (SEQ ID NO: 353)) and when applicable a donor cassette for homology-dependent recombination (PHV00011, (SEQ ID NO: 354)). Typically, a total of approximately 40 ng of the plasmid mixture was added to 0.6 um gold particles, the four plasmids were mixed by adding 10 ul of each plasmid together in a low-binding microfuge tube (Sorenson Bioscience 39640T) for a total of 40 pl. To this suspension, 50 ul of 0.6 μm gold particles (30 ug/ul) and 1.0 μl of Transit 20/20 (Cat No MIR5404, Mirus Bio LLC) were added, and the suspension was placed on a rotary shaker for 10 minutes. The suspension was centrifuged at 10,000 RPM (˜9400×g) and the supernatant was discarded. The gold particles were re-suspended in 120 μl of 100% ethanol, briefly sonicated at low power and 10 μl was pipetted onto each flier. The fliers were then air-dried to remove all the remaining ethanol. Particle bombardment was performed using a Biolistics PDF-1000 device, at 28 inches of Mercury using a 200 PSI rupture disc.

### Example 29: Agrobacterium-Mediated Delivery of a Morphogenic Factor to an Adjacent Cell Improves RNP-Mediated Polynucleotide Modification of a Haploid Target Cell

[0475] This example demonstrates that Agrobacterium mediated delivery of a T-DNA sequence encoding a WUS protein into maize immature embryo cells is sufficient to support embryogenesis and regeneration of plants with targeted mutations/deletions and no WUS gene integration at practical frequencies.

[0476] Previously, plant transformation and genome editing approaches required delivery of various DNA vectors coding for different “helper” components, including double-strand break reagents (for example, meganucleases, ZFNs, TALENs, or Cas9 nuclease and guide RNA (gRNA)), a selectable marker, morphogenic factors (e.g., ODP2 and WUS), in addition to the “donor” DNA—single-stranded or double-stranded oligonucleotides in gene editing experiments or plasmid DNA containing parts or entire genes with regulatory elements (promoters and terminators) for insertions as the result of a double-strand break (DSB) through a homology directed repair (HDR) pathway.

[0477] Multiple, co-delivered DNA molecules tend to co-integrate into a DSB site through the non-homologous end joining (NHEJ) repair pathway, significantly reducing the frequency of usable events. Moreover, stable integration of CRISPR components may lead to plant chimerism and increase the chances of off-site mutagenesis. Minimizing the introduction of the described above “helper” DNA molecules into the target cell, and limiting delivery to the donor DNA, may be beneficial and lead to higher frequencies of quality events (QEs).

[0478] Previously, we have described a method for Cas9-gRNA delivery in the form of ribonucleoproteins (RNPs) using gold microparticles. We also described a method for activation of broken pre-integrated selectable marker gene through non-homologous end joining (NHEJ) mechanism upon Cas9-gRNA delivery as DNA vectors or RNP complex (see US20180327785(A1) incorporated herein by reference in its entirety).

[0479] Morphogenic factor genes (also referred to as “developmental genes” or “morphogenic genes”), for example include but are not limited to, ODP2 and WUS are desired components of the transformation process. Their delivery into plant cells facilitates cell division and significantly increases transformation frequencies. Moreover, these genes allow successful transformation of many elite genotypes, which transformation, otherwise, cannot be effectively accomplished. However, stable integration of morphogenic factor genes (e.g., ODP2 and WUS) into the target cell genome may have deleterious effects on plant regenerability and fertility.

[0480] Here we conduct biolistic delivery of ribonucleotide protein complex (RNP) containing the complexed Cas9 with the mixture of two guide-RNA (gRNA) molecules targeting the genomic DNA sequences of SEQ ID NO: 350 and SEQ ID NO: 351, bombarded into immature embryos as previously described. After particle delivery of RNPs, the immature embryos are suspended in a suspension of Agrobacterium strain LBA4404 THY-containing the helper plasmid PHP71539 (SEQ ID NO: 184) and the T-DNA-containing plasmid PHP88158 (RB+FMV ENH:PSCV ENH:MMV ENH:ZM-PLTP PRO::ZM-WUS2::IN2-1 TERM+NOS PRO::CRC::SB-GKAF TERM+LB, (SEQ ID NO: 182)). This allows plant regeneration from cells receiving the DSB and editing components and stimulates cell division and embryogenesis by WUS protein molecules coming from adjacent Agrobacterium-infected cells.

[0481] A gene deletion of approximately 21 kb in size is generated, starting with particle bombardment of maize immature embryos using 0.6 uM gold particles coated with CAS9 protein complexed to two (2) RNP complexes targeting two sites:

site 1
SEQ ID NO: 350
GGATTCCGCGGAAATGGGTG (PAM:CGG);
and
site 2
SEQ ID NO: 351
GTCAAGGACATACGAGACC (PAM:AGG)

[0482] to generate the RecQ4 deletion. Plants are regenerated without selection and analyzed by PCR and sequencing, and qPCR for the presence of deletions and WUS integration, respectively. Results such as those predicted in Table 27 would be expected.

TABLE 27
Frequency of RecQ4 gene deletion

| Embryos | Plants | Plants with | Plants with | Plants with deletion |
|---|---|---|---|---|
| bombarded | sampled | RecQ4 deletion | WUS integration | No WUS integration |
| 350 | 1000 | >70 | <20 | >70 |

[0483] Such results demonstrate efficient, “DNA-free” gene deletion with high efficiency.

### Example 30: Particle Delivery of Viral Enhancers with the Maize PLTP Promoter to Drive WUS2 Expression Enhances Recovery of Non-Transgenic Somatic Embryos and Plants in Maize

[0484] Maize embryos are prepared as described above. Using the particle bombardment device, PHP88158 (SEQ ID NO: 182) containing the expression cassettes 3×ENH::ZM-PLTP PRO::ZM-WUS2::IN2-1 TERM and NOS PRO::CRC::SB-GKAF TERM is delivered into the scutellar surface of maize immature embryos and cultured as described above with no selection. As a control, immature embryos are bombarded with a gold/DNA mix containing a plasmid with no morphogenic gene (PHP86491, SEQ ID NO: 183).

[0485] When immature embryos of maize inbred PH1V69 are bombarded with PHP88158 (SEQ ID NO: 182) and cultured on embryogenic culture medium, it is expected that prolific embryo formation will occur in cells adjacent to those expressing WUS2 and CRC, and these newly formed non-transgenic somatic embryos will readily germinate to produce plants. For immature embryos in which the control plasmid is introduced, few somatic embryos and plants will be produced.

### Example 31: Particle Delivery of a Morphogenic Factor to an Adjacent Cell Improves RNP-Mediated Polynucleotide Modification of a Haploid Target Cell

[0486] This example demonstrates that particle-delivery of a DNA vector encoding a WUS protein on a separate set of gold particles into maize immature embryo cells is sufficient to support embryogenesis and regeneration of plants with targeted mutations/deletions and no WUS gene integration at practical frequencies.

[0487] Previously, plant transformation and genome editing approaches required delivery of various DNA vectors coding for different “helper” components, including double-strand break (DSB) reagents (for example, meganucleases, ZFNs, TALENs, or Cas9 nuclease and guide RNA (gRNA)), a selectable marker, morphogenic factors (e.g., ODP2 and WUS), in addition to the “donor” DNA—single-stranded or double-stranded oligonucleotides in gene editing experiments or plasmid DNA containing parts or entire genes with regulatory elements (promoters and terminators) for insertions as the result of a double-strand break (DSB) through a homology directed repair (HDR) pathway.

[0488] Multiple, co-delivered DNA molecules tend to co-integrate into a DSB site through the non-homologous end joining (NHEJ) repair pathway, significantly reducing the frequency of usable events. Moreover, stable integration of CRISPR components may lead to plant chimerism and increase the chances of off-site mutagenesis. Minimizing the introduction of the described above “helper” DNA molecules into the target cell, and limiting delivery to the donor DNA, may be beneficial and lead to higher frequencies of quality events (QEs).

[0489] Previously, we have described a method for Cas9-gRNA delivery in the form of ribonucleoproteins (RNPs) using gold microparticles. We also described a method for activation of broken pre-integrated selectable marker gene through non-homologous end joining (NHEJ) mechanism upon Cas9-gRNA delivery as DNA vectors or RNP complex (see US20180327785(A1) incorporated herein by reference in its entirety).

[0490] Morphogenic factor genes (also referred to as “developmental genes” or “morphogenic genes”), for example include but are not limited to, ODP2 and WUS are desired components of the transformation process. Their delivery into plant cells facilitates cell division and significantly increases transformation frequencies. Moreover, these genes allow successful transformation of many elite genotypes, which transformation, otherwise, cannot be effectively accomplished. However, stable integration of morphogenic factor genes (e.g., ODP2 and WUS) into the target cell genome may have deleterious effects on plant regenerability and fertility.

[0491] Here we describe an approach allowing prevention of morphogenic factor genes (“developmental genes” or “morphogenic genes”) integration into the genomes of regenerated plants. First, we demonstrated that delivery of only one of the two morphogenic factor genes (WUS) under a strong promoter (for example, PLTP) was sufficient to stimulate embryogenesis in most tested genotypes. Second, a WUS protein has a naturally-occurring cell-penetrating peptide (CPP) motif and therefore has an ability to penetrate cell walls. Thus, the delivery of vector DNA encoding for WUS into a cell leads to WUS protein expression and its migration to neighboring cells stimulating their division. Moreover, overexpression of the WUS protein in the targeted cell is usually toxic preventing prolonged cell division, embryogenesis and plant regeneration. Based on these observations, we conduct biolistic delivery of RNP and donor DNA on a first set of gold particles (first particle bombardment) followed by delivery of vector DNA containing a WUS expression cassette on a separate set of gold particles (second particle bombardment). This allows plant regeneration from cells receiving the DSB and editing components and stimulates cell division and embryogenesis by WUS protein molecules coming from adjacent cells.

[0492] A gene deletion of approximately 21 kb in size is generated, starting with particle bombardment of maize immature embryos using 0.6 uM gold particles coated with CAS9 protein complexed to two (2) RNP complexes targeting two sites:

site 1
SEQ ID NO: 350
GGATTCCGCGGAAATGGGTG (PAM:CGG)
site 2
SEQ ID NO: 351
GTCAAGGACATACGAGACC (PAM:AGG)

[0493] to generate the deletion. The immature embryos are then immediately particle-bombarded with a second set of gold particles coated with a DNA vector encoding for WUS (polynucleotide SEQ ID NO: 182, PHP88158). Plants are regenerated without selection and analyzed by PCR and sequencing, and qPCR for the presence of deletions and WUS integration, respectively. Results such as those predicted in Table 28 would be expected.

TABLE 28
Frequency of RecQ4 gene deletion

| Embryos | Plants | Plants with | Plants with | Plants with deletion |
|---|---|---|---|---|
| bombarded | sampled | RecQ4 deletion | WUS integration | No WUS integration |
| 350 | 1000 | 50 | 30 | >50 |

[0494] Such results demonstrate efficient, “DNA-free” gene deletion with high efficiency.

[0495] As used herein the singular forms “a”, “an”, and “the” include plural referents unless the context clearly dictates otherwise. Thus, for example, reference to “a cell” includes a plurality of such cells and reference to “the protein” includes reference to one or more proteins and equivalents thereof known to those skilled in the art, and so forth. All technical and scientific terms used herein have the same meaning as commonly understood to one of ordinary skill in the art to which this disclosure belongs unless clearly indicated otherwise.

[0496] All patents, publications and patent applications mentioned in the specification are indicative of the level of those skilled in the art to which this disclosure pertains. All patents, publications and patent applications are herein incorporated by reference in the entirety to the same extent as if each individual patent, publication or patent application was specifically and individually indicated to be incorporated by reference in its entirety.

[0497] Although the foregoing disclosure has been described in some detail by way of illustration and example for purposes of clarity of understanding, certain changes and modifications may be practiced within the scope of the appended claims.

1. A method of producing a clonal plant comprising:
providing to a first plant cell a morphogenic gene expression cassette;
eliciting a growth response in a second plant cell, wherein the second plant cell does not contain the morphogenic gene expression cassette; and
regenerating the clonal plant from the second plant cell.

2. The method of claim 1, wherein the first plant cell is a cell derived from a In cell.

3. The method of claim 2, wherein the In cell is a microspore.

4. The method of claim 2, wherein the In cell is an embryo.

5. The method of claim 1, wherein the first plant cell is a zygotic embryo.

6. The method of claim 1, wherein the first plant cell is a 2n embryo.

7. The method of claim 1, wherein the providing to the first plant cell comprises particle gun delivery of the morphogenic gene expression cassette.

8. The method of claim 1, wherein the providing to the first plant cell comprises bacterial-mediated delivery of the morphogenic gene expression cassette.

9. The method of claim 1, wherein the morphogenic gene expression cassette comprises:
(i) a nucleotide sequence encoding a WUS/WOX polypeptide; or
(ii) a nucleotide sequence encoding a Babyboom polypeptide or an Ovule Development Protein 2 (ODP2) polypeptide; or
(iii) a combination of (i) and (ii).

10. The method of claim 9, wherein the WUS/WOX polypeptide is WUS1, WUS2, WUS3, WOX2A, WOX4, WOX5, or WOX9.

11. The method of claim 9, wherein the Babyboom polypeptide or the Ovule Development Protein 2 (ODP2) polypeptide is BBM2, BMN2, BMN3, or ODP2.

12. The method of claim 8, wherein the bacterial-mediated delivery is provided by a Rhizobiales bacterial strain.

13. The method of claim 12, wherein the Rhizobiales bacterial strain is selected from the group consisting of a disarmed Agrobacterium, an Ochrobactrum bacteria, and a Rhizobiaceae bacteria.

14. The method of claim 1, further comprising contacting the second plant cell with a chromosome doubling agent and regenerating a doubled haploid plant.

15. A method of producing a genetic recombinant plant resulting from the product of meiosis, comprising:
providing to a 2n embryo resulting from a biparental cross a morphogenic gene expression cassette to induce somatic embryogenesis;
exposing the 2n embryo to conditions before, during, or after somatic embryogenesis induction, thereby changing the cell fate of the 2n embryo and allowing entry of the 2n embryo into meiosis thereby producing a 1n embryo;
selecting a 1n embryo containing no morphogenic gene expression cassette;
contacting the 1n embryo with a chromosome doubling agent for a period sufficient to generate a doubled 1n embryo; and
regenerating a genetic recombinant plant from the doubled 1n embryo containing no morphogenic gene expression cassette.

16. The method of claim 15, further comprising obtaining seed or progeny thereof from the genetic recombinant plant containing no morphogenic gene expression cassette.

17. The method of claim 15, wherein the providing and/or exposing comprises particle gun delivery.

18. The method of claim 17, wherein the particle gun delivery comprises simultaneously contacting the 2n embryo with the morphogenic gene expression cassette and a meiosis induction expression cassette.

19. The method of claim 17, wherein the particle gun delivery comprises sequentially contacting the 2n embryo with the morphogenic gene expression cassette and a meiosis induction expression cassette.

20. The method of claim 15, wherein the providing and/or exposing comprises bacterial-mediated delivery.

21. The method of claim 20, wherein the bacterial-mediated delivery comprises simultaneously contacting the 2n embryo with a T-DNA containing the morphogenic gene expression cassette in a first bacterial strain and a T-DNA containing a meiosis induction expression cassette in a second bacterial strain.

22. The method of claim 20, wherein the bacterial-mediated delivery comprises contacting the 2n embryo with a T-DNA containing the morphogenic gene expression cassette and a T-DNA containing a meiosis induction expression cassette in one bacterial strain.

23. The method of claim 15, wherein the morphogenic gene expression cassette comprises:
(i) a nucleotide sequence encoding a WUS/WOX polypeptide; or
(ii) a nucleotide sequence encoding a Babyboom (BBM) polypeptide or an Ovule Development Protein 2 (ODP2) polypeptide; or
(iii) a combination of (i) and (ii).

24. The method of claim 23, wherein the WUS/WOX polypeptide is WUS1, WUS2, WUS3, WOX2A, WOX4, WOX5, or WOX9.

25. The method of claim 23, wherein the Babyboom (BBM) polypeptide or the Ovule Development Protein 2 (ODP2) polypeptide is BBM2, BMN2, BMN3, or ODP2.

26. The method of claim 15, wherein the meiosis induction expression cassette comprises a product of a gene or genes produced from a DNA polynucleotide, a product of a gene or genes produced from a RNA polynucleotide, a product of a gene or genes as a protein or part of a protein complex, and a combination of the foregoing.

27. The method of claim 15, wherein the exposing further comprises exposing the 2n embryo to a hypoxic environment, exposing the 2n embryo to a reducing agent at concentrations that lower the amount of reactive oxygen species in the 2n embryo, and combinations of the foregoing.

The application's sequence listing, which the Patent Office published only in electronic form, follows.

SEQUENCE LISTING (354 sequences)

SEQ ID NO: 1 - DNA, 879 bp, Arabidopsis thaliana
  source 1..879: mol_type = unassigned DNA
atggagcctcctcagcaccaacatcaccaccatcaggccgatcaagagtccgggaacaacaacaacaacaagtccggttccggagggtacacttgcagacagacctccaccagatggacacctaccactgagcagatcaagatcctgaaggagttgtactacaacaatgccatccgctcccctactgctgatcagattcagaagatcaccgctcgcctgcgtcaattcggtaagatcgagggtaagaacgtcttctactggttccagaaccacaaggctcgtgagaggcagaagaagcgtttcaacgggactaacatgaccactccttcctcatcacccaattctgttatgatggccgccaacgaccactaccatcctttgcttcatcaccaccacggagttcctatgcaaagacccgcaaactccgtcaacgtgaagttgaaccaggaccatcacctctaccaccacaacaagccctacccctctttcaacaacgggaatctcaaccatgcctcctctggaaccgaatgtggagttgtcaacgcctccaacggctacatgtcttcccacgtgtacggctctatggagcaagattgctccatgaactacaacaacgttggaggcggatgggcaaacatggatcaccactactcctccgctccctacaacttcttcgatagggctaaacctctcttcggcttggagggacaccaagaagaagaggaatgcggaggtgatgcttacttggaacacagaaggactctccctctctttccaatgcacggtgaggaccacatcaacggaggatctggcgctatctggaagtatggacagtccgaggtcagaccatgcgcttccctggaattgagactgaactag

SEQ ID NO: 2 - protein, 292 aa, Arabidopsis thaliana
MEPPQHQHHHHQADQESGNNNNNKSGSGGYTCRQTSTRWTPTTEQIKILKELYYNNAIRSPTADQIQKITARLRQFGKIEGKNVFYWFQNHKARERQKKRFNGTNMTTPSSSPNSVMMAANDHYHPLLHHHHGVPMQRPANSVNVKLNQDHHLYHHNKPYPSFNNGNLNHASSGTECGVVNASNGYMSSHVYGSMEQDCSMNYNNVGGGWANMDHHYSSAPYNFFDRAKPLFGLEGHQEEEECGGDAYLEHRRTLPLFPMHGEDHINGGSGAIWKYGQSEVRPCASLELRLN

SEQ ID NO: 3 - DNA, 876 bp, Lotus japonicus
  source 1..876: mol_type = unassigned DNA
atggaacaaccacctcaacaacaacaacagaatgaggatggtggtgggagtagtggtggaaaaggggggtttctgagcaggcaaagcagtacacggtggactcccaccacagaccagataagaatattgaaggagctttactacaacaatggaataagatccccgagtgcagagcagattcagaggatctctgctcggctgagacagtacggcaagattgaaggcaagaatgtcttttactggttccagaaccacaaagctagagagaggcagaagaaaaggttcacttctgaaactcatcttcttcccaatcccatacaacaacaacaaagaaatggaactaatgctgcttggaagcaacctgaagaacaacccattattaaccacaccaagtattctagtaacaacatttcagctcctgcagggatcatcacttctgctccatcttcttctgcagagattgtttctgttggccagataggaaactttggttatggatctttgcctatggaaaagagttttagggactgctcaatatctgctggaggcaacacaggctatgctggaagtgctataaaccacaacctgggatggatgggtgtggatccatattcctcagcctacaccaatttctttgacaaaataaggccaactgaagaagaaaccatggaagaagaaggacaagagaatggttcaccagagattgaaacccttcctttattcccgatgcatggtgaggacattcatagtggctatttcaacctcaagtctaattcttctcactatgctggtggctggtaccagactgaagaagggtacttcaacaatggttctcgtgcttccttggagctcagcctcaaatatcctgattttgct

SEQ ID NO: 4 - protein, 292 aa, Lotus japonicus
MEQPPQQQQQNEDGGGSSGGKGGFLSRQSSTRWTPTTDQIRILKELYYNNGIRSPSAEQIQRISARLRQYGKIEGKNVFYWFQNHKARERQKKRFTSETHLLPNPIQQQQRNGTNAAWKQPEEQPIINHTKYSSNNISAPAGIITSAPSSSAEIVSVGQIGNFGYGSLPMEKSFRDCSISAGGNTGYAGSAINHNLGWMGVDPYSSAYTNFFDKIRPTEEETMEEEGQENGSPEIETLPLFPMHGEDIHSGYFNLKSNSSHYAGGWYQTEEGYFNNGSRASLELSLKYPDFA

SEQ ID NO: 5 - DNA, 888 bp, Glycine max
  source 1..888: mol_type = unassigned DNA
atggaacctcaacaacaacaacaacaagcacaagggagccaacaacaacaacaaaacgaggatggtggcagtggaaaaggggggtttctgagcaggcaaagtagtacacggtggactccaacaaacgaccagataagaatattgaaggaactttactacaacaatggaattagatccccgagtgcagagcagattcagaggatctctgctaggctgaggcagtacggtaagattgaaggcaagaatgtcttttattggttccagaaccacaaagctcgagaaaggcagaagaaaaggttcacttctgatcataatcataataatgtccccatgcaaagacccccaactaatccttctgctgcttggaaacctgatctagctgatcccattcacaccaccaagtattgtaacatctcttctactgcagggatctcttcggcatcatcttctgttgagatggttactgtgggacagatggggaattatgggtatggttctgtgcctatggagaaaagttttagggactgctcgatatcagctgggggtagcagtggccatgttggattaataaaccacaacttggggtgggttggtgtggacccatataattcctcaacctatgccaacttctttgacaaaataaggccaagtgatcaagaaacccttgaagaagaagcagagaacattggtgctactaagattgaaaccctccctttattccctatgcacggtgaggacatccacggctattgcaacctcaagtctaattcgtataactatgatggaaacggctggtatcatactgaagaagggttcaagaatgcttctcgtgcttccttggagctcagtctcaactcctacactcgcaggtctccagattatgcttaa

SEQ ID NO: 6 - protein, 295 aa, Glycine max
MEPQQQQQQAQGSQQQQQNEDGGSGKGGFLSRQSSTRWTPTNDQIRILKELYYNNGIRSPSAEQIQRISARLRQYGKIEGKNVFYWFQNHKARERQKKRFTSDHNHNNVPMQRPPTNPSAAWKPDLADPIHTTKYCNISSTAGISSASSSVEMVTVGQMGNYGYGSVPMEKSFRDCSISAGGSSGHVGLINHNLGWVGVDPYNSSTYANFFDKIRPSDQETLEEEAENIGATKIETLPLFPMHGEDIHGYCNLKSNSYNYDGNGWYHTEEGFKNASRASLELSLNSYTRRSPDYA

SEQ ID NO: 7 - DNA, 897 bp, Camelina sativa
  source 1..897: mol_type = unassigned DNA
atggagccaccgcagcatcagcatcatcaccatcaagccgaccaagaaagcggcaataacaacaagtccggttctggtggttacacttgtcgccaaaccagcacgaggtggacaccaacgacggagcagatcaaaatgctcaaagagctttattacaatagtggaatccggtcaccaacagcagatcagatccagaagatcactgctaggctgcgacagttcggaaagatcgagggcaagaacgtcttttactggttccagaaccacaaggctcgtgagcgtcagaagaagagattcaacggcacaaccatgaccacaccgtcttcatctcccaactcggttatgatggctaatgatcattatcatcaacatctccctctacttcaccatcatcatggcgttcccatgcagagacctgcgaactccgtcaacgttaaacttaaccaagagcatcatctctatcatcagaacaagtcatatcccagcttcaataacgggaatttaaatcatgcaagctcaggtactgaatgtggtgctgttaatgcttctaatggctactcaagtagccatatctatggatctatggaacaagactgttctatgaattacaacaacgtaggtggaggatggacggcaaacatggatcataatcatcattactcatcagcaccttacaacttcttcgatagaccaaaacctccgtttggtctagacggtcatcaggaagaagaagaatgtggtggcgatgcttatctggaacatcgacgtacgcttcctctcttccctatgcatggtgaagatcacataaatggtgccagctggaagtatggccaactggacggtcatgattgtcatggtagaggcccttgcgcttctcttgagcttcgtttgaactag

SEQ ID NO: 8 - protein, 298 aa, Camelina sativa
MEPPQHQHHHHQADQESGNNNKSGSGGYTCRQTSTRWTPTTEQIKMLKELYYNSGIRSPTADQIQKITARLRQFGKIEGKNVFYWFQNHKARERQKKRFNGTTMTTPSSSPNSVMMANDHYHQHLPLLHHHHGVPMQRPANSVNVKLNQEHHLYHQNKSYPSFNNGNLNHASSGTECGAVNASNGYSSSHIYGSMEQDCSMNYNNVGGGWTANMDHNHHYSSAPYNFFDRPKPPFGLDGHQEEEECGGDAYLEHRRTLPLFPMHGEDHINGASWKYGQLDGHDCHGRGPCASLELRLN

SEQ ID NO: 9 - DNA, 897 bp, Capsella rubella
  source 1..897: mol_type = unassigned DNA
atggagccaccacagcatcagcatcatcatcatcaagccgaccaagaaagcggcaacaacaacaacaagtccggctctggtggctacacgtgtcgccaaaccagcactaggtggacaccaacgacggagcagatcagaatcctcaaggatctttactacaacagtgcgatccggtcaccaacagccgatcagatccagaagatcaccgcgaggctgagacagtacgggaagatcgaaggcaagaacgtcttttactggttccagaaccataaggctcgtgagcgtcagaagaagagattcaacggcacaaccatgaccactccatcttcatctcccaactcggttatggtggctaatgatcactatcatcctctacttcaccatcatcatggtgttcccatgcaaaggcctgctaactccgtcaacgtcaaacttaaccaagaccatcatctctatcatcagaacaagtcatatcccaccttcaacaatgggaatttaaatcatggaagctcaggtactgaatgtggtgttgttaatgcttctaatggctacatgagtagccatgtctatggatctatggaacaagactgttcaatgaactacaacaacgtaggtactggaggatacggatcaaacatggatcatagtcatcattactcatctgcaccatacaacttctttgatagatcaaagcctctctttggtctagaaggtcatcaagaagatgaagaagaatatggtataggcgatgcttatctggaacatcgacgtacgcttcctctcttccctatgcatggtgaagatcacatgaacggtagtggtgctagctggaagtttgatggccgtgattgccatggtagaggcccttgcgcttctcttgagcttcgtctgaactag

SEQ ID NO: 10 - protein, 298 aa, Capsella rubella
MEPPQHQHHHHQADQESGNNNNKSGSGGYTCRQTSTRWTPTTEQIRILKDLYYNSAIRSPTADQIQKITARLRQYGKIEGKNVFYWFQNHKARERQKKRFNGTTMTTPSSSPNSVMVANDHYHPLLHHHHGVPMQRPANSVNVKLNQDHHLYHQNKSYPTFNNGNLNHGSSGTECGVVNASNGYMSSHVYGSMEQDCSMNYNNVGTGGYGSNMDHSHHYSSAPYNFFDRSKPLFGLEGHQEDEEEYGIGDAYLEHRRTLPLFPMHGEDHMNGSGASWKFDGRDCHGRGPCASLELRLN

SEQ ID NO: 11 - DNA, 588 bp, Arabis alpina
  source 1..588: mol_type = unassigned DNA
atggctactcatgtagccattagaagcattaacagcaccacattcagaacctgaacttgcatgatttaaattcccgttattgaagctgggatatgatttgttctgatgaagcagatggtgttcttggtcatgaagcttaacgttgagagaagcaggtctctgcatggaaacaccatgatgatgttgaagaagaggatgatgatgatggttatgatgataacgatcactggccatcataactgagttgggcgatgaagacgttggtgtggtggtcatggttgtgccattgaatctcttcttctgacgctcacgagccttatggttctgaaaccagtaaaagacgtttttgccctcgatcttaccatattgtctcagccttgcagagatcttctggatctcatcagcagttggtgaccggattccactattgtagtaaagatctttgaggattctgatttgctccgtggttggagtccatctcgtgctggtttgacgacaagtgtaaccaccagaaccggacttgttgttgttgttgccgctttcttggtcggcttgatgatgatgatgatgatgttgcggtggctccat

SEQ ID NO: 12 - protein, 304 aa, Arabis alpina
MEPPQHHHHHHQADQESGNNNNKSGSGGYTCRQTSTRWTPTTEQIRILKDLYYNSGIRSPTADEIQKISARLRQYGKIEGKNVFYWFQNHKARERQKKRFNGTTMTTTPTSSSPNSVMMASDRYHHNHHHHPLLQHHHGVSMQRPASLNVKLHDQEHHLLHQNKSYPSFNNGNLNHASSGSECGAVNASNGYMSSHVYGSMEQDYSMSNNNIGGGGWSNMDHNHHYSSPAYNFFDRPKPLFGLEGHQEEDQYGGDAYLEHRRTLPLFPMHGEDHINGGGGAIWKYRQLDGLELRLNSYAGVAPE

SEQ ID NO: 13 - DNA, 873 bp, Raphanus sativus
  source 1..873: mol_type = unassigned DNA
atggagccaccgcaacattaccatcaagccgatcaagaaagcggcaacaacaacaagtccgtctctggtggttacacgtgtcgtcaaacgagcacaagatggacaccaacaaccgatcaaatcagaatactcaaagatctttactacaacaatggagtccggtcaccaacagccgaccagatccagaagatctctgcaacgctgagacagtacggaaaaatcgagggaaaaaatgtcttttactggtttcaaaaccataaggctcgtgagcgacagaagaagagattcaacagcacaaccatggccacaccaacgtcttcatcgcccaactcggttatgatgatggctagtgatcaccatcatcatcatggtgttaccatccagagacctgctttggtcaacgttaagctcgaccaagaaaatcatatgtttcaccagaacagatcatatcccagctccaataacgggagtataaatcatgcaagttcaggcacggaatatggtgttttcggcgcttctaatggctacattagtaaccatatctatggatctatggaacaagactgttcaatgagctacaacagcgtaggtggaggatggacaaacatggatcataatcatcattactcaactccagcttacaacttctttgatagaccatcgcctctgtctggactagaaggtcatcaagaagaaggacaatatggtggcgattcttatctggaacatcgacgtacacttcctctcttccctttgcacggtgaggatcacatcaacggtggtggtggttccatcttgaagtacggacaatcagacggttgtgatcgttatggtagaggcccttgtgcttctcttaagctatgtctgaactga

SEQ ID NO: 14 - protein, 290 aa, Raphanus sativus
MEPPQHYHQADQESGNNNKSVSGGYTCRQTSTRWTPTTDQIRILKDLYYNNGVRSPTADQIQKISATLRQYGKIEGKNVFYWFQNHKARERQKKRFNSTTMATPTSSSPNSVMMMASDHHHHHGVTIQRPALVNVKLDQENHMFHQNRSYPSSNNGSINHASSGTEYGVFGASNGYISNHIYGSMEQDCSMSYNSVGGGWTNMDHNHHYSTPAYNFFDRPSPLSGLEGHQEEGQYGGDSYLEHRRTLPLFPLHGEDHINGGGGSILKYGQSDGCDRYGRGPCASLKLCLN

SEQ ID NO: 15 - DNA, 885 bp, Brassica napus
  source 1..885: mol_type = unassigned DNA
atggagccagcgcaacatcaccatcaagccgaccaagaaagcggcaacaacaacaagtccgtctctggtggttacacgtgtcgtcaaacgagtacaagatggacaccaacgaccgatcaaatcagaatactcaaagatctttactacaacaacggagtccggtcaccaacagccgaccagatccagaagatctctgcaaggctgagacagtacggaaagatcgagggaaaaaatgtcttttactggtttcaaaaccataaggctcgtgagcgacagaagaagagattcaacagcacaaccatgaccataccaacgtcttcatcgcccaactcggttatgatggctagtgatcactatcaccataaccatcatcatcatggcgttaccatccagagacctgctttggtcaacgttaagctcgaccaagaaaatcatatgtttcatcagaacagatcatatcccagcttcaataacgggaatacaaatcatgcaagttcaggcacggaatatggtgttttcagtgcttctaatggctacattagtagccatatctatgaacctatggaacaagactgttcaatgagctacaacaacgtaggtggaggatggacaaacatagatcataatcaccattactcaactccagcctacaacttcttagatagaccaatgcctctgtctggactagaaggtcatcatcaagaagaaggagaatatggtggcgatgcttatctggaacatagacgcacacttcctctcttccctttgcacggtgaggatcacatcaacggcggtggtggttccatctggaagtacagacaatcggacggttgtgatcgttatggtagaggcccttgtgcttctcttaagctgtgtctgaactga

SEQ ID NO: 16 - protein, 294 aa, Brassica napus
MEPAQHHHQADQESGNNNKSVSGGYTCRQTSTRWTPTTDQIRILKDLYYNNGVRSPTADQIQKISARLRQYGKIEGKNVFYWFQNHKARERQKKRFNSTTMTIPTSSSPNSVMMASDHYHHNHHHHGVTIQRPALVNVKLDQENHMFHQNRSYPSFNNGNTNHASSGTEYGVFSASNGYISSHIYEPMEQDCSMSYNNVGGGWTNIDHNHHYSTPAYNFLDRPMPLSGLEGHHQEEGEYGGDAYLEHRRTLPLFPLHGEDHINGGGGSIWKYRQSDGCDRYGRGPCASLKLCLN

SEQ ID NO: 17 - DNA, 885 bp, Brassica oleracea
  source 1..885: mol_type = unassigned DNA
atggagccagcgcaacatcaccatcaagccgaccaagaaagcggcaacaacaacaagtccgtctctggtggttacacgtgtcgtcaaacgagtacaagatggacaccaacgaccgatcaaatcagaatactcaaagatctttactacaacaacggagtccggtcaccaacagccgaccagatccagaagatctctgcaaggctgagacagtacggaaagatcgagggaaaaaatgtcttttactggtttcaaaaccataaggctcgtgagcgacagaagaagagattcaacagcacaaccatgaccataccaacgtcttcatcgcccaactcggttatgatggctagtgatcactatcaccataaccatcatcatcatggcgttaccatccagagacctgctttggtcaacgttaagctcgaccaagaaaatcatatgtttcatcagaacagatcatatcccagcttcaataacgggaatataaatcatgcaagttcaggcacggaatatggtgttttcagtgcttctaatggctacattagtagccatatctatggacctatggaacaagactgttcaatgagctacaacaacgtaggtggaggatggacaaatatagatcataatcaccattactcaactccagcctacaacttcttagatagaccaatgcctctgtctggactagaaggtcatcatcaagaagaaggagaatatggtggcgatgcttatctggaacatagacgcacacttcctctcttccctttgcacggtgaggatcacatcaacggcggtggtggttccatctggaagtacagacaatcggacggttgtgatcgttatggtagaggcccttgtgcttctcttaagctgtgtctgaactga

SEQ ID NO: 18 - protein, 294 aa, Brassica oleracea
MEPAQHHHQADQESGNNNKSVSGGYTCRQTSTRWTPTTDQIRILKDLYYNNGVRSPTADQIQKISARLRQYGKIEGKNVFYWFQNHKARERQKKRFNSTTMTIPTSSSPNSVMMASDHYHHNHHHHGVTIQRPALVNVKLDQENHMFHQNRSYPSFNNGNINHASSGTEYGVFSASNGYISSHIYGPMEQDCSMSYNNVGGGWTNIDHNHHYSTPAYNFLDRPMPLSGLEGHHQEEGEYGGDAYLEHRRTLPLFPLHGEDHINGGGGSIWKYRQSDGCDRYGRGPCASLKLCLN

SEQ ID NO: 19 - DNA, 882 bp, Helianthus annuus
  source 1..882: mol_type = unassigned DNA
atggaaactcaacaacaacaagcagatattcaagattttgggaacaaaaacagtaacacctatgcatgcaggcaaagcagtactaggtggacacccacaagtgatcagatcagaatactgaaagagctctactacaacaatggaatcagatcaccaactgctgatcagattcagagaatcgctgctcaactcagacagtacggcaagattgaaggcaagaacgtgttttattggtttcagaaccataaagctcgtgaacgccagaagaaacggttcactcctactgctcctccaccaccgtctcacttctccgatcatattaaccaccatcttcccaacgctgcccccatgcagattccgtctcaccaccaccactaccaccatcaagaaccaccacatgtctatgctcaccctcacaaactctacaccactcatcacattggggttggttcttcttcacaaggagtgatgggtgtagggtgtggctatggatctgttgctatggagaagagtttcaggaagtgttcaatatcaccaccgggagagagtaaggccacaggaggaattggccggaatatcggttcaagatcacggataagtgtcgattcgtgttccttcttcgacacaattaagccaaagacatatgagatgtttgagaatcatgatcaagatgaagaacaaggagagccttcaactgagatcgaaacacttccattattcccgattcacgacggcaaccatcatgatttcttcggcatgaggacggcaaatctgcaattggagcaaggcactggaggttactacactggaggaagctggtatcggtctgatgagagggcgtctcttgagctcagtctcaactcatatggttattataactaa

SEQ ID NO: 20 - protein, 298 aa, Helianthus annuus
METQQQQADIQDFGNKNSNTYACRQSSTRWTPTSDQIRILKELYYNNGIRSPTADQIQRIAAQLRQYGKIEGKNVFYWFQNHKARERQKKRFTPTAPPPPSHFSDHINHHLPNAAPMQIPSHHHHYHHQEPPHVYAHPHKLYTTHHIGTHNIRVGSSSQGVMGVGCGYGSVAMEKSFRKCSISPPGESKATGGIGRNIGSRSRISVDSCSFFDTIKPKTYEMFENRDQDEEQGEPSTEIETLPLFPIHDGNHHDFFGMRTANLPLEQGTGGYYTGGSWYRSDERASLELSLNSYGYYN

SEQ ID NO: 21 - DNA, 795 bp, Populus trichocarpa
  source 1..795: mol_type = unassigned DNA
atggaacctcaccaacaacaaccaaatgaggataataacggtggcgccaaagggaactttctttgcaggcaaaccagtacaaggtggaatcccactactgaccagataagaatattgaaggaactgtactacatcaaaggtgttaggtccccaaatggagctgagattcagcagatctctgctaggcttagaaagtacggcaagattgaaggcaagaatgtattttattggtttcagaaccataaagctcgtgagaggcaaaagaaaagactcaccaatgaagtccccatgcaacaaagaactgcctggaaacctgaagattattactcttacaagtactccaacagtaataataatcctgggttttcttcggcttcttcatctgcaaataccggtgtggttactgttgggcagacagatagccatggatatggatcggtaaccatgcaggagaagaattcttgggactgttcagcaccagctggtggtagcaatggtgctggtagtggatccatgagcaatattaactatggatcaggggttgacattaactctcacagttcatcctatgctgtatttggtcaagaacaagaagcagctgcaaagattgagactcttcctctatttccaatgcttggtgaggacatcagtagctctttcaacatcaacaatatcaacccagacttttattacagtagcggctgtggctatggtgattatggcaatgacacttcttcccgtacttccctggaccttagtctctactcctacaatggccaaccacaagattattaa

SEQ ID NO: 22 - protein, 264 aa, Populus trichocarpa
MEPHQQQPNEDNNGGAKGNFLCRQTSTRWNPTTDQIRILKELYYIKGVRSPNGAEIQQISARLRKYGKIEGKNVFYWFQNHKARERQKKRLTNEVPMQQRTAWKPEDYYSYKYSNSNNNPGFSSASSSANTGVVTVGQTDSHGYGSVTMQEKNSWDCSAPAGGSNGAGSGSMSNINYGSGVDINSHSSSYAVFGQEQEAAAKIETLPLFPMLGEDISSSFNINNINPDFYYSSGCGYGDYGNDTSSRTSLDLSLYSYNGQPQDY

SEQ ID NO: 23 - DNA, 843 bp, Vitus vinifera
  source 1..843: mol_type = unassigned DNA
atggaacctcaacaacagctccagcagcagcagcaacaaaaccaacaacagccaaacgaggatagcggcagcagcaaaggcagttttctgtgcaggcaaagcagtacacgctggactcctacaactgaccagataagaatattgaaggacctttactacaacaatggagttaggtccccaagtgctgaacagattcagaggatctcagctaggctgaggcagtacggcaagatcgaaggcaagaacgtcttttattggtttcagaaccataaagctcgtgaaaggcagaagaagcgattcactactgatatgcccatgcaaagatcccttggaaatgccggttggagacctgatgatcccattcacaacaaatttcataccattcccactcctgggatatcttccccatcttcttcttcttcacccagtgtgcttgctgttgggcagatgggaagctttggatatggatctgtggagaggagttttacagactgttcaatatcagcaggtggtggtcgtggtggggttggtggatctataaaccagagcttcgaatgggttggcatggacccatattcttcatcttatgcactctttgacaagagaaaaacaatgggtgaaagcttcgaagaagagcaagaagaagaagcaactccggagattgaaacgctcccactctttcccatgcacgctgaggatatcactggcttttgcaacattaagcccgaatccgacgcctactactccggctggtacaggcccgccgacgccaagaccagttcccgcacttctcttgagcttagcctcaactcctacgccggcaggtccccggattccccctga

SEQ ID NO: 24 - protein, 280 aa, Vitus vinifera
MEPQQQLQQQQQQNQQQPNEDSGSSKGSFLCRQSSTRWTPTTDQIRILKDLYYNNGVRSPSAEQIQRISARLRQYGKIEGKNVFYWFQNHKARERQKKRFTTDMPMQRSLGNAGWRPDDPIHNKFHTIPTPGISSPSSSSSPSVLAVGQMGSFGYGSVERSFTDCSISAGGGRGGVGGSINQSFEWVGMDPYSSSYALFDKRKTMGESFEEEQEEEATPEIETLPLFPMHAEDITGFCNIKPESDAYYSGWYRPADAKTSSRTSLELSLNSYAGRSPDSP

SEQ ID NO: 25 - DNA, 879 bp, Arabidopsis thaliana; identical to SEQ ID NO: 1
  source 1..879: mol_type = unassigned DNA

SEQ ID NO: 26 - protein, 292 aa, Arabidopsis thaliana; identical to SEQ ID NO: 2

SEQ ID NO: 27 - DNA, 879 bp, Lotus japonicus
  source 1..879: mol_type = unassigned DNA
atggaacaacctccccaacagcagcaacaaaacgaagacggaggcggatcaagtgggggaaaaggagggttcctcagtaggcagtccagtactaggtggacacccaccacagaccagattcgcatcctcaaggagctctactacaacaacggaatacgctcaccctccgcagaacagatccagaggatctccgcaagactcagacagtacggcaagatcgagggcaagaacgtcttctactggttccaaaaccacaaagcccgcgaaaggcagaagaagcgcttcaccagtgagacacacttgctgcccaacccaattcagcagcaacagcgcaacggaacaaacgcagcttggaagcagccagaggagcaacccatcatcaaccacaccaagtactcctccaacaacatatccgcacccgcagggattatcacaagtgccccatcttcttccgcagaaatagtctccgtggggcagatcggaaacttcggatacggatctctgccaatggagaagtccttcagggactgcagtatctcagccggaggtaacacaggatacgccgggtctgctattaaccacaacctcggatggatgggagtcgacccatactcctctgcttacaccaacttcttcgacaaaatacgcccaacagaggaggagactatggaggaagaaggacaggagaacggctcaccagaaatcgagaccctgcctttgttcccaatgcacggagaggacatccactccggctacttcaacctcaagagtaactcatcccactacgctggcggatggtaccaaactgaggaaggctacttcaacaacggatcacgcgccagtctggagctgtccctgaagtaccctgacttcgcttag

SEQ ID NO: 28 - protein, 292 aa, Lotus japonicus; identical to SEQ ID NO: 4

SEQ ID NO: 29 - DNA, 909 bp, Medicago trunculata
  source 1..909: mol_type = unassigned DNA
atggaacaacctcagcagcagcagcaaccacagacccaacagcactctccaaacaacggaatcatggggtccagacagagttccaccagatggaccccaacaaccgaccagatccgcattctcaaagacctctactacaacaacggaataaggtctccaagtgccgagcaaatccagaggatctccgcaaggctcagacagtacgggaagatcgagggcaagaacgtcttctactggttccaaaaccacaaagccagagagcgccagaaaaagcgcttcacctccgacgtcaacgtcgtccctatcatccagcgcgcccccaacaacaatactatcataagtgccgccaactggaagcctgaccaccacgaacaacagcagaacattaatgtccacacaaaccactccacatacaacatctcctccgctggcctcagttctgcttcctgctcctcagcagaaatggtcactgtggggcaaataggcaactacggctacgggtctgtcccaatggagaagtctttccgcgaatgcaccatctcagctggatgctcatcatcccaggttggctcaaccataaacccccacatcggctggatcggacaccacgtcgacccatattcaagtgcctacgctaacctcttcgagaaaatacgccccaacgaggagatcatggaagagtacgaccagggacaggaaaacggttccccagagatcgagacactcccactcttccctatgcacggagaagacatccacggagggtattgcaacctcaaatcaaattcctccaactacggaggatggtaccaggcagaagacgcagggttcatgtacggaagtcgtaccacttctctcgagctcagtctgaactcctacggatgcaggtcccccgactacgccaattaa

SEQ ID NO: 30 - protein, 302 aa, Medicago trunculata
MEQPQQQQQPQTQQHSPNNGIMGSRQSSTRWTPTTDQIRILKDLYYNNGIRSPSAEQIQRISARLRQYGKIEGKNVFYWFQNHKARERQKKRFTSDVNVVPIIQRAPNNNTIISAANWKPDHHEQQQNINVHTNHSTYNISSAGLSSASCSSAEMVTVGQIGNYGYGSVPMEKSFRECTISAGCSSSQVGSTINPHIGWIGHHVDPYSSAYANLFEKIRPNEEIMEEYDQGQENGSPEIETLPLFPMHGEDIHGGYCNLKSNSSNYGGWYQAEDAGFMYGSRTTSLELSLNSYGCRSPDYAN

SEQ ID NO: 31 - DNA, 924 bp, Petunia hybrida
  source 1..924: mol_type = unassigned DNA
atggaaacagcacagcaccagcagaacaaccaacagcactacctccaccaacacctctccatcggacaaggaacaaacatcgaggacggcagtaacaagaacaactcctccaacttcatgtgcaggcaaaatagtacccgctggacaccaaccactgaccagatcaggatattaaaggacctctactacaacaacggagtcagatcacctaccgctgaacagatccagagaatctccgccaagctcaggcagtacggcaagatcgagggcaagaacgtcttctactggttccagaaccataaagcccgcgagagacaaaagaagcgcctcatcgccgcagccaccaccgataacactaacctcccaatgcagatgcagttccagagaggagtctggagatcctctgcagacgaccccatccaccacaagtatactaatccaggagtgcactgcccttcagcttcttcccacggagttctcgcagtcggacagaacggcaatcacggatacggagccttggcaatggaaaaatccttccgcgactgctccatcagtccaggcagttccatgtcacaccaccaccaccaaaacttcgcttgggcaggagtcgatccttattcctcaaccacaacctaccctttcctcgagaagaccaagcacttcgagaatgaaaccctcgaagctgatgaagagcagcaagaggaggaccaggagaactactactaccaaaggaccacctctgccatcgaaaccctgcctctcttccctatgcacgaggagaacatctcctccttctgcaacctcaagcaccaggagtcatccggaggattctacaccgagtggtacagagcagacgacaacctcgcagcagccagagcttccctcgagctctccttgaactccttcatcggcaactcctcctag

SEQ ID NO: 32 - protein, 307 aa, Petunia hybrida
METAQHQQNNQQHYLHQHLSIGQGTNIEDGSNKNNSSNFMCRQNSTRWTPTTDQIRILKDLYYNNGVRSPTAEQIQRISAKLRQYGKIEGKNVFYWFQNHKARERQKKRLIAAATTDNTNLPMQMQFQRGVWRSSADDPIHHKYTNPGVHCPSASSHGVLAVGQNGNHGYGALAMEKSFRDCSISPGSSMSHHHHQNFAWAGVDPYSSTTTYPFLEKTKHFENETLEADEEQQEEDQENYYYQRTTSAIETLPLFPMHEENISSFCNLKHQESSGGFYTEWYRADDNLAAARASLELSLNSFIGNSS

SEQ ID NO: 33 - DNA, 864 bp, Phaseolus vulgaris
  source 1..864: mol_type = unassigned DNA
atggaaccacagcagccccagggcagtcaaccaaacgaggacggtggaagtgggaaaggcggatttctctccagacagtcctccactaggtggactccaaccactgaccagatcagaatactcaaagacctctactacaacaacggaatcagatccccttccgcagaacagatccaaaggatctccgctaggctcagacagtacgggaagatcgagggcaagaacgtcttctactggttccaaaaccacaaggccagggagagacagaagaagaggttcacctccgacaacgtccccatgcaaagacctgcaccaacaaatgctgcacctccttggaaacccgaccaagaccccattcacaccaagtactccaacatctcctccacaggaatctccagtgcatcctcctcctcagtcgagatgatcaccgtcggacaaatggggaactacgggtacggaagtgtgccaatggaaaagtccttcagagactgctccatatccgccggaggatcttccggtcatgttggaataaaccacaacctcggctgggtgggagtcgatccttactcttctgcatacgccaacttcttcgataaaataagaccaaacgaagagaccctcgaggaagaagaagaggaggaggaggaggaagaagaagaggacggaggagcagaaattgagaccctccccctgttcccaatgcacggagaggacattcacggctactgcaacctcaagtccaacagttacaactacgacggcaacggctggtatcacagtgaggatggcttcaaaaacggcagtagggcctccctcgagctctccctcaactcttacaccagaagatcccccgacttcgcatag

SEQ ID NO: 34 - protein, 287 aa, Phaseolus vulgaris
MEPQQPQGSQPNEDGGSGKGGFLSRQSSTRWTPTTDQIRILKDLYYNNGIRSPSAEQIQRISARLRQYGKIEGKNVFYWFQNHKARERQKKRFTSDNVPMQRPAPTNAAPPWKPDQDPIHTKYSNISSTGISSASSSSVEMITVGQMGNYGYGSVPMEKSFRDCSISAGGSSGHVGINHNLGWVGVDPYSSAYANFFDKIRPNEETLEEEEEEEEEEEEEDGGAEIETLPLFPMHGEDIHGYCNLKSNSYNYDGNGWYHSEDGFKNGSRASLELSLNSYTRRSPDFA

SEQ ID NO: 35 - DNA, 3200 bp, Glycine max
  source 1..3200: mol_type = unassigned DNA
agttttttagtagtattttaacgttttttgaaacacctaacattcttttaagatattaccttctgaattctaattttttatattttctttcaattttattattaatatatttatttattttctttgttatcttttcttaaaataaattatgattttattattttttttatcattttatatttttcacctacttcaacaaactaattttttagtttccggtttaccaactagcttgcctacttctagctagtttttttactagttttgacaaaactaactaaagtcaaaaagttaattagtagttgaatgttgaaaatatatcttattaaatcataaaatggttgataaaattatttattaaagtaactgaacaatataaaattacatggacatatttttatacaacttttaatttgacttttttctataaaaagaactataatatttataatgttagtattaaattaattttaaacatttgtagctttttatttatgaaatataaaaaaatctacataaacttattatatatcaccatcaatatcatatataataaaatggtaaaaatgagaaaattctatcatatgtaaaaaagttaatttttttttcttaaataaaaaagattaaaaaggaaaacttataaatgttaaagaacaaaaaagaataaatacaaaaagttataaaaactagtgttttaaaaaatataacttaaaatttttaataacttctaacattttttaaaacgttacttaaggtaacactttttaatatatcaacttctattttattatatatcactatcaatatcatatataataaaatggtaaaaatgagaaaactctattatatataaaaagttaaaaataatgaattttttccttatataaaatagattaaaaaaaattctaataaatattcaacaacaataacataataaatataaaaagttacaaaaaaaaactaacatttttaaaaatataactttagtgtttcaaaaatccttagagttgttaaataaaaacttatttaccaaatttttaaactagtaaaaaaattaaaaactaattaaaatatcttgttaaatatattttaaatagtgtataatttatcatgtaagataatattcttatttttataataattactttaaaaatcatatctaaaagatttttaatatgtaatattatatatatatatatatatatatatatatatatatatatattcataaaacatcattaaaagtgacattaaaaacatattaaaaatcacattaaagcacattaataacatttaatttcaatactaagaactctttcaattcttgaaccaattacacttgtcttaatgggggaaaaaaaaacaaactctatacttatccgatcggaaaaactgcaaaagagaagaagaaatgaatgggagtgacacgcacaaattaatttcaagataccagcacttagtagcaatttagtagcatttgtttggtagccgtcattcgttgcattgcaccgtcaactcgcaaaaaatttattagtagttttatacaccaaaaatatgctgcgtctctttctctctcccctctctatcaattacacctcttttgccctccattaaatgcaattgcaccctctcaatacgctctgcaattactcttcgctgccacattttcctccatttgttccccacttccctctcctccttcaatgcccttgtccctatctcttcttcttctcctcactttctctctgtaacacctcttcatgccatagcttctttttcttttcttttttaccatataagtaaacattttttttttcaaaactgtcccaaacccttccttcaaaacggtcatctcttttcaacccaaaacagatctacaccttcatcttctactcccactctcactggtaagttaaaaaaaatcttgtttgtaaaacttctgtcgcaaccagggtcactgcgtgaatctctgtaacattcatgttttttttgttaaggttgtctaaggtcattgtttttttttaaagaaaaaaaaaagaaactaactaatgaaactgtttggtacaatttttttttttttttttgtgagttctaacatttttcaggtgagtcacttgtagctagggctgtgagaaaaggaacgttattaggtctgcaagaaaaaaaaagaaaaatatcctgatatataggatatgcgttgtaggattttctccgagatcttcgtgggtgttatattttctttaaaaaagttttgattttgttttgcgaaaagacaagatcagataagggttacaatatttctttgctttttaattcatatattttgatatgatatatgcatagcgtatatttgtttcgaaattttgattaagtttttttctctttaatcttttttttctcttggaggtcacgtttgtatcactgagtttttttgtagtaacacacacacttactcgctttgacattgctatctgacagaaaatccaagggctcaacttcttaagctttttctctatccaagaacctcttaggagagagaaagtgatatatatagagagagaaagagtcaattctacatatacttgttggtggtggtttttgaggcatgtgaagtatgcaagccgttattatgatgattccggcgagaaacatgccttcgatgatagcaaggaacaacaacaacgttggagggttttttggatcatcttcatcacctttcactcttgcccaggtcggtgcttttaacttttcaccttctctttcaactcttttgactctcttaccttctcttttttttttttttcacaattgtccacctctttaatttttcacccttttttcattaaaatttttgaaacaaaattgacccatctcaaaattttcacttttttaacgatcagtcgatcacatttgcatcacaaattaaaccaaccagaccaaatatccttctcgatattacaaatccgcgtttccccaaaactgcgttatttttctccataaaaaagtcaaaagaaaaaaaaaattaaactttctttaaaaaaaacaagaaagaaagaaaagaaaatgttgatatgtttgttgtgtctttttctctgagagagaaccgtactatactacatgtgtttgaattgtgtttttgttagattgagaaactataatcctctctccggaaccttaaaagatccgtagcaataatcata

SEQ ID NO: 36 - DNA, 1547 bp, Glycine max
  source 1..1547: mol_type = unassigned DNA
agttttttagtagtattttaacgttttttgaaacacctaacattcttttaagatattaccttctgaattctaattttttatattttctttcaattttattattaatatatttatttattttctttgttatcttttcttaaaataaattatgattttattattttttttatcattttatatttttcacctacttcaacaaactaattttttagtttccggtttaccaactagcttgcctacttctagctagtttttttactagttttgacaaaactaactaaagtcaaaaagttaattagtagttgaatgttgaaaatatatcttattaaatcataaaatggttgataaaattatttattaaagtaactgaacaatataaaattacatggacatatttttatacaacttttaatttgacttttttctataaaaagaactataatatttataatgttagtattaaattaattttaaacatttgtagctttttatttatgaaatataaaaaaatctacataaacttattatatatcaccatcaatatcatatataataaaatggtaaaaatgagaaaattctatcatatgtaaaaaagttaatttttttttcttaaataaaaaagattaaaaaggaaaacttataaatgttaaagaacaaaaaagaataaatacaaaaagttataaaaactagtgttttaaaaaatataacttaaaatttttaataacttctaacattttttaaaacgttacttaaggtaacactttttaatatatcaacttctattttattatatatcactatcaatatcatatataataaaatggtaaaaatgagaaaactctattatatataaaaagttaaaaataatgaattttttccttatataaaatagattaaaaaaaattctaataaatattcaacaacaataacataataaatataaaaagttacaaaaaaaaactaacatttttaaaaatataactttagtgtttcaaaaatccttagagttgttaaataaaaacttatttaccaaatttttaaactagtaaaaaaattaaaaactaattaaaatatcttgttaaatatattttaaatagtgtataatttatcatgtaagataatattcttatttttataataattactttaaaaatcatatctaaaagatttttaatatgtaatattatatatatatatatatatatatatatatatatatatatattcataaaacatcattaaaagtgacattaaaaacatattaaaaatcacattaaagcacattaataacatttaatttcaatactaagaactctttcaattcttgaaccaattacacttgtcttaatgggggaaaaaaaaacaaactctatacttatccgatcggaaaaactgcaaaagagaagaagaaatgaatgggagtgacacgcacaaattaatttcaagataccagcacttagtagcaatttagtagcatttgtttggtagccattgagaaactataatcctctctccggaaccttaaaagatccgtagcaataatcata

SEQ ID NO: 37 - DNA, 3300 bp, Arabidopsis thaliana
  source 1..3300: mol_type = unassigned DNA
taacaatgataagctacattgagtgtatcagttctaaaactttatagtatgctacaatcaatttttctaagtaacaacttcaagcaaggaatcacacacacacagtggtacataataaacttgattttaatatcatatgatcagcatcattaacggaataagttaagtaattcgtcatccatactactaagtcatattaaaatcataatcaaacttaaaagccgattagaaagagagcaaatatatctaaaaattcacgaggaagacgacaaatgcaaggaaacacagctagtattattaaacttaatagatattggatgaatgactgcataatatatatcacattaaaagtggacataaatttgcatatgtgtaatgtacctctccacaattaatcgcggaccatttattttactattacaagtcaagtaactttatattgttgatccataattcttttcgaacataaaatcatatacttaggccattttcaactgtcaaaactcgaatccgagaaccaaatttcaccattttccaaaaatgatgagtgtcgaccaaatggggtactactgtctaatcaggaacttgtgaacaaattttcaaccttttccaaataagacgagtgtcaaccaactttttccaaccaagagatattgggttgctacacaaatacttaatagccattgcatatttatgcatatgcaaatgcagggtcgtggcgtcagaaagaaacataggaccctcaacatatttaatattttgggagctatatttgactatttcatattagaaaataataataaaaaagtgttggttttatatcaaattgtaatttacgaaaaacttatgcttttgcgcaatgatttttgtaaagtatctactatgtttagtgtttacattgattagtaggctgccgttttttttcttgtgtattatgtactatatatgaatatgaacatttgtaaaagtgaatcttgtcattttcttgttgaaaacatatatagtatgtgcaaacaaagcataggttaatccaataccacacaaataacacgtcaggtaaatccaataataaatcgtatgtgcatgtatgtgtattcatgtatgttacatgaatgtctgaatcagtcagtgtacgtatatgatgtaggtgatgtaaatcttaatgtatgagctgtttcttggaccatggtccacaatggatattgctccccaactacattagtcaatcgactggccaatttttaattaagataattaatccaaactaccattaaatataactttgaccttttttctattcatttttagatattattggaacttacgtagtttacatgcatctcatccctttcttttgctccttgaaagtgggtccaatcacaaaaaatgatcttatattttgtattttgtattttaaaaactcataattatataggttcaaaaatttaattaacatcagtgtatactataattactactctagccaacaagataaattcattttgacatcagccaaaagataaaaatttggttaaaaactattggattagcttttagtatttaatattttatgtactgattaaatacgaatttagaaatctaggatataagtgagggtgtataataagggaggggtggaccattaatagcgatgtgcaattaaaaattatgattaagaatctaggaaatttgtagattgcttagttatttttatggcgatcgtcgtgtcaatgtcatggattttgaaactttaaattaatctcttaaattagcacctacctttgaattttatagaatctttttattttatatgtttaattttatagaatctaactagcttattttgagattaaattgtttagttacttttataacagtataaatgtataatgaggacctaagaatgtagtcctgtaatgttcttgctattctacttaatctcatcaccaatcaaccatcaaaagaagctagtactaataaaacctgcaggtattcgaataataattaagctcaaacactatactaatttatggaggattatatattcaatgaattaggaacctcatgatggacattattgactgatataatgtgtatactaattgtgagtatttaaaaaccatacaaagcatttatatgtccacatatattggacacacatgcaatcaatgttcaatatgctccacacacagaaataaaaatactctttctgatcatatgatacatcatacatatactaaaaaaatctaaaatgaactataaccacaagcatatataataacaatgaaatggtaatgtttcttcatttttatttgttcaaattcttattcggttgttttttcttaccctacgagaatccgtgaggtcaaagggaaacagtgattttttttttgtattttgttttttaaattgatgaactgtaaaactctctctctagaaaaatatataagtagtagtatgaattttctctcactaaaagcattaatggacctttcgataatcataaatgcaatgcaccctctctatgcatttcgcaataactccttttccttctgccacatcctcttcctcacctctttctcttcttccctttctcctaagttcctcctccaccaaattctccatttatttcgttaactatcctccatttgttttcttctgaagagtgatatattctacctttctctggttaaagaaactccctgaatccaccggttatgtcttgaccggctataagcctataaactgatgccctaagacacctttttaggtttctcaataattctccgcatctatcttttcttctccacaagtaagagaaccagaaaaccagagaagaagccgagctagctagggtttcattgtgtgcacaaaagtaagatctctctctctaaccaatacttgtgtaatttgtctttgtttctttgagcaaatattgcatgtttgttcatattagccggatccgttttatattttttcatgatctacattttatctttattttgtttgtaaattaatgagttttttttttttttttctgtttttgtcacgatctaaaaaacaagcgttacaaagaagaagaaaaacctttttggagttagaagtgtaaaaggggtttcagtttgacgaattttccttagtagttgtgtaaaaaaaggccattgacttaatgtcaactctatatatctacacatttttttattaattagtttttgtttttttcccacttcatttacctttagtcaatgaatttttactgaaaacgttttttcaaggtcaatttcactgagttaaaaaaaa

SEQ ID NO: 38 - DNA, 6022 bp, Glycine max
  source 1..6022: mol_type = unassigned DNA
tcgttgaaaacagaaaatggtgatgagaatgtatttggttggatttttgaaaacattttcagtgaaaatgaaaacagaaaataaccagaaaatgaaaataataaaatttcgttttcagcgttttcaattgaaaacaagaacctcattttggataaaatgaaaatgagatgaaaataaatgtaattttaagcaaatttaaaaatacaaaaaaagtcaatatatcataaattttcaatatttttatttcctaaaaacagaaagcaaaaagttaaaccaaacatatttttagaattctaatctttagaaaataaaaacaattttcaaaaaatgaaaataaaaaataaaaatataaaccaaacacacaatatttcagcttgtgagtgcaaaacatatgcacgtttttcatttaagtatttctacagataactagacgaattgaaagttgttataaattttacttcaacaaccaccttaaaagggacctccgcatgatgatgaacgccactagttagaccatctctaatctctctgcattcttgcatgataagagaataatgaataattctaacataaaattagcttacgacattttcgcctctattactaatttgctagtattttatctttatctacctagcttgcattctgcatatgaaatttgtggcatgtaattttattaatgctatttaaaccaatgaatatattgaagctgcttctatgaattttactttttaacctaacatcaaattaatgacaaagaaaaggttcaaaaaattattttgaagcactactcgatcagaaaatggttcaatgaaatataaatgcatagctacagtggtgaactaagatctataatctctatatatccttatatattctttcattgatattcctcttaaaagtacatccaattgattgaagccttatctttacatgtataataaataataaaaaattagagcaataaacatatttacagattaactgacttaattaaagacaataaatatactaaacaaaaagaataagactataagagcatgtctcattattattaaaggtaattttgaaaataatatataaatttaggataaattatatatataaaaaggaacaaaaggcagcggttgattattaaattagttaatttgttgatgacttgtaaatcatgagaaactaaagaaaaataaaaaaacacctcaaacttccaccaaatcaccatatccaccgacagccaaatcaagtcataaaatgtcgatgaacctccccatctaccttgatcatgagtttgggattcaattgtagtgcattgacacctcgctttcaaagcaccctccagcctaatttgtagagccagtcaaacttgattctctacttttacctttatttaaaaaatcgtgcttaatatataatgcaagtttatagtatacccattccctttcttcacaaaaaaaaaaaatgaggaaatagaacattaagtactaggaatagacagagaagtctttcttaagttgggactgggatctcccgatctggtgggcggtactgtagcttaataaatctgactggggctattaggtggtgttttgtttgggagtttatttttttattttttatttttaaatttttaagatttataagatatgtatcaataataaattactttaagtttaagatatcatgatattttttgtttttcagaaaaggctaaaaatattgattttttgttttcagttttggatctatttttaaaagaaaatatttttaaaattttaaaaaaatacatttttattcttattttttttatttgaaaataaaaacaaaaaaacactcaaatcacgcatcattctagattttgagtgtctttttttctcaatgacaagagactattaatattttttagttcacttggtcataaactaattccactattagattttgagtgtgtgttaataaaaaatatttattaatcaacaatttttttatcaacaaatattaattttattaatagagagaatcaaattcacaattttttttaatcattcaacccacctcatatctcccaaatctatcaccagattaaatctttctaccatataagaatcaaatttaaataaacacaattattatttagtgactaattttgtcttctaaaattagtatataagaaaatttcatatttaacagctccaataagtctcactatgattatataccaaaattaaactcttagaagaattgttactgaaatcattaatatatatttttatggagaaaccattaaatttcaaaagagtctttctattataaattataatttataaatatgcttaatcaatatttcgcactaataaataatagaatgtttgcttataattaatttaatttgcgacgctagggttgagaaatacaggagttaaaagaagttgttgagttcagtggacctaggtcacaaaataaaagttaaattaagcatgaatgatatcgcgctctaactctcttctgttcacgtatatccatttacaccagtcgtccctccataaatgcttctacaccctctgcaataactccatgctgccaaaccttctctcacttgttctatttatctcctcctgcgttgtttcgttctgtctctattttgctttggcccaaactaaaactccatcaactactccttcacttccctaattccccccacacccattcttgtttctaccgttccagtcatcatcaacataactaattaaggtttacaccactatcaaacgcttaaggtcccctctcgcatatacgcgtgtttaattttagctttgacttgctttgctttgcttagcttagttaatttctgagtgagagaaaggggtaacggctacgtcccccgcattgaaattggttacttgactagcgtaatcatctgttttgtcaaacctttcacactctctacccttattttgtcttttctgatttccctagcttttgtcttttggggtggcaagttttgcgtgtaagataagagtattaaggccaaccaaggccaggtaaagtcaccagtgcctctttgcaaccttaacataagaatgaatctccaaacaaacacttgaaagtgctgcatatcgatcagagacaaaacagcggcacgagctggtcgatgcttttatcagtttcagctttgcgagacggttccataaatcccaattgcaagtaccatcaaactttacagagggaaagcggtcgattcattgctgtcatcttcgtggttaatctaacaggtgatcacttccctaatttcttattttctctcctaattaaacagagatagaacaccttttcttttttgagttgaacagcaatttgactaaatggtaaaacttgtacattttctttattctcgatggggagatctggcttagaaattttttacatatagaactccgattattaatcgttgttgttgttatcaaatttgttcaatttaatgctttattgccaacaaattaagtttagtctttttgagtaatgtgagtacttttctaagcatctaataataagctattgaagctcaatttgcctaaagcaccaaacttaatgctttattattttttgttttataggatacttttacttactttataagaattacaaaataaaatttagttagtgattttatatttgtgaaacttttatattttttaaatattctgtaaattattaaaactctattatcttattacagtatttgtttttatgataaggaagtggaaggaaaatgaaaagaaactatattatttttttaatgtttatttgagtgggaaaaaaagtttcaattctaaggcccatgagaaaatataattccttccctcccaaatttggcatgaaagggttgaggggaaaaatgatctcttactcatttttatttttgtttttttaatatatatatatatatatatatatatataacatgattttttatataaaaaataaatgatttcaccttatgaaaaatagttaaatataaaaagtttgtcttttaaagttaattgtattttttttaattagaatgataaatataactttttttgtaaggcctgtggctctttcgtgcttccataagcatcactatgagactaacttaaacagttagcccttttcccctttccccctttttcaaatatgcaaaccgaactcgtctatttattttcacttatctaaataattacaggaaaaattctctacgtttttcttatttccatatatcaaaataatacattttttctattcttttaatattttgttttttatctttcttatttttttctctattttatttctaattcaaatagaacattaatttgtttctatcgaatctttgttacccataataaactgtgtgtagtgtatacttgtaggttttttttttttaaaaaaaaatccttctgtctgctcaattaacaaataattctaaatcatttaatattctcttactaattttcctacattctttatatgtaaatgttctatatcttcaaacaaaatatcccggtatacattaactaataaccgaatactctctctccgtcttaagtatcgatctagattaatttatccagataaaaaaaaagttaatacacgtatgaaaaaataataattttacaaaattaaatttattaaataaattaaaaaaagtactattggtattacattaaaaaactaaagtgaaacttactaaaagagaataattttaaatttgacttctggatatataattgtattaaatagttgtatacataatttctatccttgtacaaaattgtctataataaaaaaattcatgtgatttataccaattttttcccatacccatatatattaatcttgtaaaatgtttaggatatataattaatatttttaactagaactagaatttgaatttttacttaagtaaaaaaaaaactcattttagaattaaaatcacaattattatagcataactaaaatcaacccttcccaattatattttggaaccaattgaccttaatctcaattcaatttgtaaaaaaaaaaagcgtattaaatagaaaaaaatacattaatattttaaaatataagcaatatatttaatacatttttcatttaattaaagaagaagattagtaagaagatattgtaagaaaaattgtaattattgtttgtttttattttttttatgcaatagaaataatagattttatatgattatagaaataataaatttaaacttaagatttcgtgcaaaaatttcaaattctctcacctcattacatgaaatatagtatatcttttatttttttcattttgtgtgcaagttaaagaacattaattacattaaacaatattactatcattgttcgtatttataaaatctaattaaattaaaaatacatctttattcattactatttccgttcttatttataagatccaaattattaaaaaaacaatttaaatatttaattgaatatgattgtttggtacatccttaattgaatatgtttaataatttcttaagaaatgtgtggataatagttaacatgaggcttattttctttttattaatgctaatacttattaaattatatattttcatatttttgagatgccagatgtattggatttttaatttttaatacattttacaaaatgtacatagaaagtcaatataaataatataattaatttaaaagaaatagcattgctcatttactattttactaaaaatattaaatttttgccttatgtagttatgaacatttaatgtaataataaactaattctaatgtatattatattgattattgaacttctttaaaatatattcttaagggccctcgctatatagggctacacaaactacactcttcttggtcgatctcccacatttttctctacccctcgcgcgtgttaaattttttgaaatcctggttttgcagagaagctatagagaagaagattgcggcttgtgaacttaaggatttaagtgaagtca

SEQ ID NO: 39 - DNA, 5966 bp, Glycine max
  source 1..5966: mol_type = unassigned DNA
tcgttgaaaacagaaaatggtgatgagaatgtatttggttggatttttgaaaacattttcagtgaaaatgaaaacagaaaataaccagaaaatgaaaataataaaatttcgttttcagcgttttcaattgaaaacaagaacctcattttggataaaatgaaaatgagatgaaaataaatgtaattttaagcaaatttaaaaatacaaaaaaagtcaatatatcataaattttcaatatttttatttcctaaaaacagaaagcaaaaagttaaaccaaacatatttttagaattctaatctttagaaaataaaaacaattttcaaaaaatgaaaataaaaaataaaaatataaaccaaacacacaatatttcagcttgtgagtgcaaaacatatgcacgtttttcatttaagtatttctacagataactagacgaattgaaagttgttataaattttacttcaacaaccaccttaaaagggacctccgcatgatgatgaacgccactagttagaccatctctaatctctctgcattcttgcatgataagagaataatgaataattctaacataaaattagcttacgacattttcgcctctattactaatttgctagtattttatctttatctacctagcttgcattctgcatatgaaatttgtggcatgtaattttattaatgctatttaaaccaatgaatatattgaagctgcttctatgaattttactttttaacctaacatcaaattaatgacaaagaaaaggttcaaaaaattattttgaagcactactcgatcagaaaatggttcaatgaaatataaatgcatagctacagtggtgaactaagatctataatctctatatatccttatatattctttcattgatattcctcttaaaagtacatccaattgattgaagccttatctttacatgtataataaataataaaaaattagagcaataaacatatttacagattaactgacttaattaaagacaataaatatactaaacaaaaagaataagactataagagcatgtctcattattattaaaggtaattttgaaaataatatataaatttaggataaattatatatataaaaaggaacaaaaggcagcggttgattattaaattagttaatttgttgatgacttgtaaatcatgagaaactaaagaaaaataaaaaaacacctcaaacttccaccaaatcaccatatccaccgacagccaaatcaagtcataaaatgtcgatgaacctccccatctaccttgatcatgagtttgggattcaattgtagtgcattgacacctcgctttcaaagcaccctccagcctaatttgtagagccagtcaaacttgattctctacttttacctttatttaaaaaatcgtgcttaatatataatgcaagtttatagtatacccattccctttcttcacaaaaaaaaaaaatgaggaaatagaacattaagtactaggaatagacagagaagtctttcttaagttgggactgggatctcccgatctggtgggcggtactgtagcttaataaatctgactggggctattaggtggtgttttgtttgggagtttatttttttattttttatttttaaatttttaagatttataagatatgtatcaataataaattactttaagtttaagatatcatgatattttttgtttttcagaaaaggctaaaaatattgattttttgttttcagttttggatctatttttaaaagaaaatatttttaaaattttaaaaaaatacatttttattcttattttttttatttgaaaataaaaacaaaaaaacactcaaatcacgcatcattctagattttgagtgtctttttttctcaatgacaagagactattaatattttttagttcacttggtcataaactaattccactattagattttgagtgtgtgttaataaaaaatatttattaatcaacaatttttttatcaacaaatattaattttattaatagagagaatcaaattcacaattttttttaatcattcaacccacctcatatctcccaaatctatcaccagattaaatctttctaccatataagaatcaaatttaaataaacacaattattatttagtgactaattttgtcttctaaaattagtatataagaaaatttcatatttaacagctccaataagtctcactatgattatataccaaaattaaactcttagaagaattgttactgaaatcattaatatatatttttatggagaaaccattaaatttcaaaagagtctttctattataaattataatttataaatatgcttaatcaatatttcgcactaataaataatagaatgtttgcttataattaatttaatttgcgacgctagggttgagaaatacaggagttaaaagaagttgttgagttcagtggacctaggtcacaaaataaaagttaaattaagcatgaatgatatcgcgctctaactctcttctgttcacgtatatccatttacaccagtcgtccctccataaatgcttctacaccctctgcaataactccatgctgccaaaccttctctcacttgttctatttatctcctcctgcgttgtttcgttctgtctctattttgctttggcccaaactaaaactccatcaactactccttcacttccctaattccccccacacccattcttgtttctaccgttccagtcatcatcaacataactaattaaggtttacaccactatcaaacgcttaaggtcccctctcgcatatacgcgtgtttaattttagctttgacttgctttgctttgcttagcttagttaatttctgagtgagagaaaggggtaacggctacgtcccccgcattgaaattggttacttgactagcgtaatcatctgttttgtcaaacctttcacactctctacccttattttgtcttttctgatttccctagcttttgtcttttggggtggcaagttttgcgtgtaagataagagtattaaggccaaccaaggccaggtaaagtcaccagtgcctctttgcaaccttaacataagaatgaatctccaaacaaacacttgaaagtgctgcatatcgatcagagacaaaacagcggcacgagctggtcgatgcttttatcagtttcagctttgcgagacggttccataaatcccaattgcaagtaccatcaaactttacagagggaaagcggtcgattcattgctgtcatcttcgtggttaatctaacaggtgatcacttccctaatttcttattttctctcctaattaaacagagatagaacaccttttcttttttgagttgaacagcaatttgactaaatggtaaaacttgtacattttctttattctcgatggggagatctggcttagaaattttttacatatagaactccgattattaatcgttgttgttgttatcaaatttgttcaatttaatgctttattgccaacaaattaagtttagtctttttgagtaatgtgagtacttttctaagcatctaataataagctattgaagctcaatttgcctaaagcaccaaacttaatgctttattattttttgttttataggatacttttacttactttataagaattacaaaataaaatttagttagtgattttatatttgtgaaacttttatattttttaaatattctgtaaattattaaaactctattatcttattacagtatttgtttttatgataaggaagtggaaggaaaatgaaaagaaactatattatttttttaatgtttatttgagtgggaaaaaaagtttcaattctaaggcccatgagaaaatataattccttccctcccaaatttggcatgaaagggttgaggggaaaaatgatctcttactcatttttatttttgtttttttaatatatatatatatatatatatatatataacatgattttttatataaaaaataaatgatttcaccttatgaaaaatagttaaatataaaaagtttgtcttttaaagttaattgtattttttttaattagaatgataaatataactttttttgtaaggcctgtggctctttcgtgcttccataagcatcactatgagactaacttaaacagttagcccttttcccctttccccctttttcaaatatgcaaaccgaactcgtctatttattttcacttatctaaataattacaggaaaaattctctacgtttttcttatttccatatatcaaaataatacattttttctattcttttaatattttgttttttatctttcttatttttttctctattttatttctaattcaaatagaacattaatttgtttctatcgaatctttgttacccataataaactgtgtgtagtgtatacttgtaggttttttttttttaaaaaaaaatccttctgtctgctcaattaacaaataattctaaatcatttaatattctcttactaattttcctacattctttatatgtaaatgttctatatcttcaaacaaaatatcccggtatacattaactaataaccgaatactctctctccgtcttaagtatcgatctagattaatttatccagataaaaaaaaagttaatacacgtatgaaaaaataataattttacaaaattaaatttattaaataaattaaaaaaagtactattggtattacattaaaaaactaaagtgaaacttactaaaagagaataattttaaatttgacttctggatatataattgtattaaatagttgtatacataatttctatccttgtacaaaattgtctataataaaaaaattcatgtgatttataccaattttttcccatacccatatatattaatcttgtaaaatgtttaggatatataattaatatttttaactagaactagaatttgaatttttacttaagtaaaaaaaaaactcattttagaattaaaatcacaattattatagcataactaaaatcaacccttcccaattatattttggaaccaattgaccttaatctcaattcaatttgtaaaaaaaaaaagcgtattaaatagaaaaaaatacattaatattttaaaatataagcaatatatttaatacatttttcatttaattaaagaagaagattagtaagaagatattgtaagaaaaattgtaattattgtttgtttttattttttttatgcaatagaaataatagattttatatgattatagaaataataaatttaaacttaagatttcgtgcaaaaatttcaaattctctcacctcattacatgaaatatagtatatcttttatttttttcattttgtgtgcaagttaaagaacattaattacattaaacaatattactatcattgttcgtatttataaaatctaattaaattaaaaatacatctttattcattactatttccgttcttatttataagatccaaattattaaaaaaacaatttaaatatttaattgaatatgattgtttggtacatccttaattgaatatgtttaataatttcttaagaaatgtgtggataatagttaacatgaggcttattttctttttattaatgctaatacttattaaattatatattttcatatttttgagatgccagatgtattggatttttaatttttaatacattttacaaaatgtacatagaaagtcaatataaataatataattaatttaaaagaaatagcattgctcatttactattttactaaaaatattaaatttttgccttatgtagttatgaacatttaatgtaataataaactaattctaatgtatattatattgattattgaacttctttaaaatatattcttaagggccctcgctatatagggctacacaaactacactcttcttggtcgatctcccacatttttctctacccctcgcgcgtgttaaattttttgaaatcctggttttgcag

SEQ ID NO: 40 - DNA, 456 bp, Zea mays
  source 1..456: mol_type = unassigned DNA
aagcttgctttcacatctcctccggtcctcctccatgtgtacaccaaacaaaccaagaagaaaaaaatgcatggttttgttcccgatttataccttggagcaacccttccattctcttgaaattttctttgtcgccccttgaacttccccccatatgtccagtccagctacaaattaatggcgacgagcgatgaaacgcacggaacatatatgcctcagcaggcaaacgtcccagtcgtcgatctctggcacttaattaattgtttatattaattccaactcgttcgtgcaacggtgcaaacaaaacaagctgacgatgtcgagtcgctgtttccccttccaccttaattgcttttgcagccaaacctcctgctggacaaccagcagctccagctactgcagcagcaacacctgctggaccagatcccggcgacgacggcggagagcggcgacaac

SEQ ID NO: 41 - DNA, 3000 bp, Oryza sativa
  source 1..3000: mol_type = unassigned DNA
ttaaaaaaatctggaaaaaagaagcgatttaaaaaaggaaacaaaaaagtgacgttaaaataggagatcttaaaaaaaagaaacgcgtagggatgcagctggtgcgcgcgccggctcctttcccttgcgcgcacgcgcgctagcatcccccataagtttaacccataaattatatttgcttcgttcgtttctcaatggcttgttagtcataggtcaatcaatcagagtctagaaaaagaggtaattttttccattgttgagaagatattaggagatactatttttttagtgtgaaatttgatatctatactagctatctcggtataaaaattactttaaatgtaaaatttagatgcctcaatatatatacttttttaagaaccgtataatttctcatagaaaaaagcaatgaagacggacatgactctcattagtagtgtacttttttttttcctaatccactatatagtgtaccattatccattaatttcttttatcttttacaactttgattttgagggatttgcatactgttttgaaaggttgattgtggttatttctcacttgattagatgcatgagtttttaaaataatttaatttcaagtagatacaatactcatgtatagatgatataattgtgtattattccctccatcctacgtatttttagtgtttaaaatttgttagcatttcttgagtattattttcctaacccacctaattaaccactgaaattatttctcactagtttgcatcgctgggcatgatatttcttattaaggatgtgtttagttcacattaaaattggaagtttggttgaaattgaaacgatgtgacggaaaaattaaaagtttaggtgtgtaggaaagttttgatgtgatagaaaagttggaagtttgaagaattattttgaaactaaacacggcataaagtgaactctcgggaggccgggggcatcgtgaaataaaaaagaaatgttggatatcagagaaggggctctcgtattgaaattttgttaagaggggtgagtttcgaatcgggatcggcgagcccatactttaagaggatatcttgaaataatttcaccgtaaccttaatttacgctaaaatccctaaacatatttatattcgtggacatggcgagtacatgccacgtttcttctgctagtaatttttcacataaatttttttttctcagcaagaaaggctggctatatactccagtgcagaaagagtgaaaaagactacaccaaacaagcatgaggcgtgtggaggcatgaaaacagtacgtacccagggcacagcagtgaaaacatcgatctcttcaccctgcatggtgtctccttaaaatctgatcgatcgactcccaaaaatataagtaaaatactcgagtcaaaatgcatcagtttgcatgcatagtgaaacagcagcaagctggtcttccacaggatactttttgacccattcctcctatacatgcatgtaattaatcacaaagttgcaaaaaatacaatactatgattgtgtatttgtgtgtactatatataaaacaaataaattaacctagtagtaactgatcagtatcgatcgagagtcaacaaaatatatgtagactacgacgatacgtgtgtgccttcctgttttcttttgttcttatctttgggccgcactatacgctgcatctatactaaacagtagtgaaaaatctacctctccaccactcaattattacgccggtctataataattcgttgtataaattacggggcaacagtgaattattcatgtgctcttgcgtgtaggattgccaaacaactgtttcatggtcagataaatgaaaaaaaagcgacaaattggtaacaataaggaaatgttaattaatttatgacatgtattactttcattaaaaatataatagtttctgactatacatgtatctcggaggtacataaccaaaaattcttagaggaagtataaaaaaaatgttttcttgttattggctacgaggtctcccaaaaatccaatgttgtacaaatactatattacatgtcaatttgaaattgtgttaataagtaaaaaaggacactccaatttctccatatcctcaattgaggaaatataaaaacaaaatttgtttaaaaaaatgtttcaggaagtataaaaaatgttttattgttcttggctatgaggtctcccaaaaatccagtgttgtacaaacactatattacatgtcaatttgacattgtgttaataaataataagtcaaaaaaggacactctaatttctccatatcctcaattgagggaatataaaaacaaaaattggaattgaaagttgaaaccatgcaccactagtctctctctctctctctctctctctctctccccttccatctctttctctcccctagcaattacactacgccttctccataaatgcgattgcaccctctcaacactccgcggcaataactccttcgcccccctctccacattctcttccacctgtgttccccttttcttctcctcttcttcttcctctcctcctcctgatcctgatcgagaagatctcaccttgatctcttgccgtgtgatctctagctctcgctagccctctgaaccttgcagtttgttgtttgcacccggtgaaacatcttcttttgtgcaggtaggagagacagcaaagcagagataagagttctatatttgcatgtagttcttgtcttggatctcactggctggctgtctcctctctgcagcaaggttcgttgggctagcttgtgtgctagatctgtttctacttgcgtttgcgttgcttggcaagcaagatatatatatatatatctatatctatctatctatcattctatctccctacatatttagagctagcactttgtgtgttctttgggtttgggacacactcatatacgcgtgttcatgagtggaaatggaaggagctgcaagggcaagaattagggtttgagatataggagtata

SEQ ID NO: 42 - DNA, 3000 bp, Arabidopsis thaliana
  source 1..3000: mol_type = unassigned DNA
ttctgatcgaaaccgagaggataatttggaataagtaataacgaataatttgttaacaagtcgctttttatagattccttgtgagaaaacgtctttatcatatcaaacgatttttggtgagttattaatcttgtcgcagcattaagcatatatgatgccactttaggtcgtcggttacgttaattaacttacataaaattagatccaagaaaaaaaaatcttgcataagaaaagaagaaagaactagtttatttattaagctgtgagtttatcctaaaatatagtttggcttgtaaactagaattacatatagcagctgcaaaaaatgatggtgatgatgattttcacattgacaacaacaattatacaacgttatgatggtcgtcaatcgatatcaactcgaaaatataatttagaacttttgcatatacataggcacacacatatttttgtatgtatgaacatggtttagtgtatagttgatagtttaaagacattgattctttgaatggtcggagcttttagtgcgtttggttggtcggatcgccttgaaagctaaaaaaagacaactttgtccgtatgtgttgtcctagttttggagtaatttattttcgaccgttttagccattagcggaaaccacctaactctctctatcaaatgttctttagcgttggtccgttgcaaacatttgatcactgtattaataacatcgaccatacgatgctgttttgttcgtaccaaattcaccgtagtaaacgctgaaactttttttatttttttgtgtgtgtgcgcacaaaacgctgaaactagttaaaatataaatatattggataataagtataaagtacccaatatatttgtatctatttatattcgtgacatttgaatcgagttttacatggtatcggagtaacgagacaatcgataccatattattgctttgacctaccagttaatcaatatatacatatttcaagtctattaactcgtaagtctaatacaattagaaaaatgaaaaaaaataaaagaagaagatatatatggaaatattggcatttgtcttaataatgtaatcaatcatcaattgtagaagccaaaggcatctctagtgtcaacgaatttgaattgatataccaactaacatactttcaaaaccggtagattatacggtattggaagatgatgaaaagaagagtttatttctcttcaaaagttacaaattatataaatgtcatataccgtaagatgagatagttgaatattcacgtggtgtttatagtgtctacataggtaaaagacattaatcatacaatcgtattaacaaaattgattgtaaaaaaaaaaaaaaaagggttgattgtaagttcgtaacctctatgtggactgtgtggcccaaaccaatcggtcggaagctacaatactgtgtccgaatcctaaaaggctaaaaactgactcggaccagcttagagatcatatgaaattatggatagcggaatagctggcaacttcaatgaattctgaatttaaaacatttttttttatatatatagatgatttggcgattttcgaactggaatggtgaaaaagtggttgagtacactattagtttatttatttaaaaaatagagggaaattcaaatgaaaaaaaaagtttcatctacagaaaaaaaaacacgtcaaaattccaaaaaacttgaacgtcttgaacaacggtataaccgtataagaaagggaacttaaaacttaaacgtctacatgattgaaagggtaaaaatattcatattacaatggtataagaaaatggagaagccagaggagcaactccaaagaagaagatgcagcaagagagtgtacattattataattataagttggtatatatgtagttgctaaaaaaaaaaaagagtgtacaatattttctgaagaagcatcgagctggttaatatttaagacccaccaaaacctaccaacaatgttattctcatctctaagcaaaagtttgatctcatctttttttttaattttttttttgatgggtcctcttctacctctgcatctccacgtgctatacaagtggcctcgctgtatgtattatttaccactctcttattgttactaaaaacttgaatgtcacttgaatgtcacttgaatgcaaactatatatttaggtgaataccagatcaaatagcaataaataaaccaacaatttatgctaattaaaaacttgaaaaaacactttccattacctatgattttttaatccaatcttggggtttgatgcccataaaacgaagtcgaaaagagaaaagcgaccttaattgtaataaatgcagctattgacttctctatcaacttcaagtcttcaagtaactacaaatttaataatctccttagcttatcttagagaagcacaaaacaaaagggtctacgcttagtcttcctagattcttgatttgagtcttgatggccacttgctttttatgtctcaatcctaagagttgatacttacttagtattaatcaggtttcacattatctcagacctagcttgcatttttgatacaaacatgtcatgcaatacacataagcaacacgtaccgagtcattgattgaaaaacatgacctaaatagtaatacggactgagagagagtgatgaatcatttcatatgggagacagctttctcatacgcgtccatgcctttgcatgaaagattaaataattcaactctttcacttatcttattttaatttactttgcagaattccaagttttattgcaatcaccaggggtattaaatgggatagtgtaaatgcacctgcaacacatcaactaaccacacactcctccacctgtttgtatttacttcaaaaacttaattcaaaaatccctttgcttctttccttccctctatttataaaccctagtatccggtttttattctaccacacaataccatttgcaacaaacttctctctgaatctcagtgaattctcataaa

SEQ ID NO: 43 - DNA, 2546 bp, Glycine max
  source 1..2546: mol_type = unassigned DNA
aaaatatattaaaagcgtgagtttatttgtttatactttttgcaatatctatatttttaataataaattaagatcttcaattttattatacaatatttcaagattaattgaaacattttttttttcaattaattcccgtccaaaattttcaattgtctaattattatgactgcttagtcttattaataaaaataataataaatgatgtatcatatcatattaagatttatcaactataatttaaattaaaataagtgtttttttaaaataaaataaatgattttataatttttttgatgcatttgtttaattttttatttaaaataagtaattttttgttttcttaaaaccaaccctatctgcttaatcatttttctaaattttttcaaaaaatttaaacaaattagttcataatattttatgactttaaataattcagtaccagcaactgcctcattgactttgcacttgccactgtcctgcctttgcacgaaaaataacatataaataacgcgtagcactgttttctatatctaaattagtctatataaaacataataattacataaatattcggagattttataaacaccgacaaaaaataaagtttaaagtttgtgatttttatgtcaatttctttttattcataagaattgaactcaaatataaaaaaaatttataacaacgtacaactaaattagactcattgatatttttatgtgaaatttaagtttaaccaaacaatatttatctagatatatgcataaagaaagagttttttttttagtttatacttagaccaatttttattttattttttatggaaacttagaacagatgttaatgagcagaaatatcaattatgaaataaaaatacaagtaattaatattttattttagttcttatagctcaattttttaataacacttttttggtccttgttctctaaaattatttaacgtaattacatttagatcttttaaaagtgttacaaaactgcaacggatagtgtaaattaaaaccgctaaaaagagatttgggtaaattttaatggtcataaataaatacaacaacaacgccttatcccactaggtgagtcggttacatggatcaacttccgcctaatcgtcataaataaataaagaaaagaaaacaagactttgttgtgccatcaaccatggccaaggcagaatcacgcgtgacaaactttcataaacgaattgagaaccttattggcattgggtcagagccatcggcgactgtgcttgttttgttgacggatttacatcatcaattccagttttgtaacaattttgaagaatatggatgtttgcattaggcaactttagacatccaataccaaaaggtttaacaattgtaactatatggaccaaaactcctattttaaacaataggtatcaaaagctaattaaacttttattaaaatagcaagcctaggaagcatacgtgtgtatatactaaaattgctgcatgagtgaactacacaaattcaatataattgttcaccatacttcagacaaaataatgttggcccagtcccatttaatgtaagactcaaaatctatgccagttgacccgaaccacacacaaacaatggtagaaatttggagtacgtatattggccacagtagcctactcaactgaaaagcaaccaacctatgaactttgctagctgtttccaagccatagcaattaaacttttccccttttacttttattttcttgaaatttttatgtaccaaggtgggttggaaatttcaaattggtaaatcaggttaattcctttctattagctaggtgcactcaatcttccatgtttatatacactataacattttatacagcatcaccttctgtatgtctatttattaatacagaaaagcatacacatactatgtattgattgccacagcctggtacaatcagccacaactgtttctcaaagtaacttgtatattgatattcatttatacctaagggtatgtctctatcctgctcccacaaatgtgggggaactgtgttgtagatttcactttcaagcgattgatattatatgttcaaggtaactcccctaattaatatattgaatgagacaatttgtgtaatgctaaataaggtttctatatcctaaacttctttagagtaaacatatgctaagaaaatggggtgtaccttcaattagtaccaaatttgcacacaagttgcttaagcttaattttgaaaaaaaataaaagggtttggagagagaggatatttggatgtattagacatgtgctcaaggttttttcagaaaatttcaggctatattacaagaagtagtgaattaatatcatgagtaaatgcaccctgcaaaacatcaactaaccacacactcttcccacccgctaatatttacttctcacttctgtgaactgttttatattccatgctttctcccttccccaaaccacacttcaaaatcctctggtaacccttattttatctattctctctctttcttttgtgttctaagcagctagaagca

SEQ ID NO: 44 - DNA, 2500 bp, Glycine max
  source 1..2500: mol_type = unassigned DNA
aaaatatattaaaagcgtgagtttatttgtttatactttttgcaatatctatatttttaataataaattaagatcttcaattttattatacaatatttcaagattaattgaaacattttttttttcaattaattcccgtccaaaattttcaattgtctaattattatgactgcttagtcttattaataaaaataataataaatgatgtatcatatcatattaagatttatcaactataatttaaattaaaataagtgtttttttaaaataaaataaatgattttataatttttttgatgcatttgtttaattttttatttaaaataagtaattttttgttttcttaaaaccaaccctatctgcttaatcatttttctaaattttttcaaaaaatttaaacaaattagttcataatattttatgactttaaataattcagtaccagcaactgcctcattgactttgcacttgccactgtcctgcctttgcacgaaaaataacatataaataacgcgtagcactgttttctatatctaaattagtctatataaaacataataattacataaatattcggagattttataaacaccgacaaaaaataaagtttaaagtttgtgatttttatgtcaatttctttttattcataagaattgaactcaaatataaaaaaaatttataacaacgtacaactaaattagactcattgatatttttatgtgaaatttaagtttaaccaaacaatatttatctagatatatgcataaagaaagagttttttttttagtttatacttagaccaatttttattttattttttatggaaacttagaacagatgttaatgagcagaaatatcaattatgaaataaaaatacaagtaattaatattttattttagttcttatagctcaattttttaataacacttttttggtccttgttctctaaaattatttaacgtaattacatttagatcttttaaaagtgttacaaaactgcaacggatagtgtaaattaaaaccgctaaaaagagatttgggtaaattttaatggtcataaataaatacaacaacaacgccttatcccactaggtgagtcggttacatggatcaacttccgcctaatcgtcataaataaataaagaaaagaaaacaagactttgttgtgccatcaaccatggccaaggcagaatcacgcgtgacaaactttcataaacgaattgagaaccttattggcattgggtcagagccatcggcgactgtgcttgttttgttgacggatttacatcatcaattccagttttgtaacaattttgaagaatatggatgtttgcattaggcaactttagacatccaataccaaaaggtttaacaattgtaactatatggaccaaaactcctattttaaacaataggtatcaaaagctaattaaacttttattaaaatagcaagcctaggaagcatacgtgtgtatatactaaaattgctgcatgagtgaactacacaaattcaatataattgttcaccatacttcagacaaaataatgttggcccagtcccatttaatgtaagactcaaaatctatgccagttgacccgaaccacacacaaacaatggtagaaatttggagtacgtatattggccacagtagcctactcaactgaaaagcaaccaacctatgaactttgctagctgtttccaagccatagcaattaaacttttccccttttacttttattttcttgaaatttttatgtaccaaggtgggttggaaatttcaaattggtaaatcaggttaattcctttctattagctaggtgcactcaatcttccatgtttatatacactataacattttatacagcatcaccttctgtatgtctatttattaatacagaaaagcatacacatactatgtattgattgccacagcctggtacaatcagccacaactgtttctcaaagtaacttgtatattgatattcatttatacctaagggtatgtctctatcctgctcccacaaatgtgggggaactgtgttgtagatttcactttcaagcgattgatattatatgttcaaggtaactcccctaattaatatattgaatgagacaatttgtgtaatgctaaataaggtttctatatcctaaacttctttagagtaaacatatgctaagaaaatggggtgtaccttcaattagtaccaaatttgcacacaagttgcttaagcttaattttgaaaaaaaataaaagggtttggagagagaggatatttggatgtattagacatgtgctcaaggttttttcagaaaatttcaggctatattacaagaagtagtgaattaatatcatgagtaaatgcaccctgcaaaacatcaactaaccacacactcttcccacccgctaatatttacttctcacttctgtgaactgttttatattccatgctttctcccttccccaaaccacacttcaaaatcctctggtaacccttatt

SEQ ID NO: 45 - DNA, 2763 bp, Sorghum bicolor
  source 1..2763: mol_type = unassigned DNA
cgaggtgctgtgcagatggaatggctactcacgctgacatttttcaggtgagagatcagagttggcaagggacgaaggaatggaggttgggatgggatgggatgggatgggatgggatgggggttgagagggactgacagcacgccaagctagctgaattaagcaaagttaaataagcttatgttggattagtagttggcatgttgggcaggaaagcaatccaggttaaaaattgcttgagggttgcaacctgcaaggctttgcttcagagtggctcaaatttgggtaggttttgatggcactcttttgattttgacaccaaatctttctcgcgacattaactatataatttcctattttaaccactttttagaaatgaaaattattagcacaataaagaagcatttgtaatgcgatatttttttttctgaattctcaagttttttttagatgaagatccttcaaagttgaaatttgttagtaccaaataagcccataaaattggaatgagcttaacgtgaatattccccggacaacctagtcatgacacttgttttggcagagtgaggacccatggtgtttggcattgcagcacagtaccaatctgccactgcctgatgagtgatgatacaagagcatcatcgaaaagcaacagtagatgacaccaggttttggaagggcagccagcagctttctgaccaccaccagacgtatatgaaacaaaagcaatcaggagagcatatcaggtttggtgagaaaagttgtgttaacaaatgaagactggaattccttgactgatcgcaagatgctaccagcagcaaacacttagaatgtaagctacaggcgtgtcaggagctaaagttttgcagataggaggtggctctcagcttctctctccgttgccttcaagtgaagcctcggcaaaaccgggcatgaaacacgcatcgcccgccccaattccttgtgcagtccaaaaggaccagaaccatttcacagtttcacagttgcattgacaggaagtaattcgaagacacgacataccgacgccagtaacaatataccataaaaagcatgggttgatgggttggtcatccaaacagaagattagctgataaacagacaaagggatgtgaaaacgaaccttttatggtagcaggtagcgatggcaatgctctatcttcttttgcagattttctcatgaatatcactgctaaagccagttttcatcaactccataaatcgaaagcgaaggggcataacatcagttcctccatactttctacccagtttcagtatttttgtgcggtcgtagctaaccgcagggagcattcttttggcacattcaactattggaattcgatgaccatgccaaacatcttaaaaccttccatcaaccgaaagtacaagtacaacatacaacggatatagatggaaactttcgttcataaagtttggtatcggcaatgtatttactaccacttaacagatgcatctctggcatccctgcagtaaagaagcagtaataggaacagaagaaaggttttacaaaatctcacgggtatcatgatcatcagttcattgccaggtgtgaccatagataaaccacagcaagatgtaaccaggatcatgcagtcccgcaccagtaggctaagtgctcgtccttgcgagatgtgctaaagagcccaccacatttcaggcagatgaagctgctcccatcagcaaacgcatccaggatgatctgcttccttccactctcagcaagaatgcaggcctcatcagaattcagcatatcgacagggtctgacccaggtccttgtgaagggttagtatttgttgactgagcctctgctatggcacattgggcaagcaaagaggcaagctcatcaacactaggagtggcctgcaatctctgcgcatagagttcacgcgcacggttcattgtctgcatgagcgcttgttcaccaccttgagatcttatggccaggagaacctgcatagtttcataacatgagaatcaatataacagatacagatgaatgggcatgaaatgagacaaatgagtctcaacgaaacaagataaagttcaaaaggttaataattaccacaaggctcatcattgggatctatacgaacaaaattgaaacagccttccagaaggaatcaaaatagaaattatgcatttcaatagaccagaatgcttgtcacattaccaatgtttgattcattaccagaacaaatcctacagtgttattatgagggacacatcaatcataagatcccacaggaaacagctaaggcataatcttatattgcgtaaatgttggtctaaaaaaatcagttacactaacataggcacatagctatggtgcaggcaggaagcactaatgacagagtgtggtgttgcagttgagaagtaattagcctactactccaatccacagagaagacgtgcatttcattcgatccatgtgatacatcaggtaatatgctatacatgtctaatccaaacaagatacggaaattccaatttaaccatcgcacactaatacatatagagaaagatttgtttaggcctatattgccctgtactcctgtgtaaatttagtacagtatactcaaataattttatgagggtaccaaacactaattgtgggctgtggctttcttcttcaacttttcccaaaccaaccttctacttttacccttactcaccaatataagggctcgacggtcatttttaacaggtcaaatccaaaatgattg

SEQ ID NO: 46 - DNA, 2567 bp, Oryza sativa
  source 1..2567: mol_type = unassigned DNA
aggtagcataagaccatcatctttttccctttctaatatattatactacctctatattttaatgtatgacgccgttgacttttcgtccactatttgaccattcgtcttattcaaaaaatttacttaattatcatttattttattgtgacttgattcaccatcaaatgttctttaagcatgacataaatattttcatattttcacaaaaaatttgaataaaacaaatagtcaaacattagtaaaaaaaatcaatggcgtcctatattaaaatacggagggagtagtttttctaaagtatcctgtgaatcacacgcgcatatgtagcttgcatagttacacaaaatatgcctcctttaaatgccggagctaccaaaatgggctcataatagcctgaaattaagtagtcccttcaccgacaaaacactagttactactgtatcatcaacaacgacctgaatttacagtaggggagaaacagcttgaatataagctgaaataagttgaacccataccatcatcgctagtgaagagtttgattgcagataattagttatgcttagtataaaatgcaaaaatccatctgatctataacaataggtaaataaatcacatctctaatttatttacccatgctggttctttcagaaataatatttaaatactttgaaagttgcgttgaagacagtcggcccggatattaaggttcaactttatttcttttttcatcaattagtttatgcaattctgcccaatgatattgttactagtaaattttacagacagtagccaacactgtggatttatttattccataacccatgagagagatgtgataatatgcacacactactaattcagtacagtgatttaatatcacttatatctcatcatatcttggatgtcatgtagaataccaagtcaatgcaaaatctattttctttttttttcaccattaaatctttcaccaaatcataaaaaatcttatgtggcggctagctcatttaatcctatgtaaaacatcttaggtcgagtattaggactgtgccaacagaaatactatgtgctagcccagctttcaggggcccaacaatcaccaaagtaactctgcccttcggaaaattaaaggcagccactcagacacacagtgatatccagcaaatgcacgacggatcacatggagtttcagccccagggccaatcacatcttgcgcaagtacagccgttgctggtatcttcaaccattcctctattatctcctggcctggtcctgctcagctgcaactgtaacggttagttcagtcccatacttcttccgtttcacaatgcaagtcattctaccatttttcacatttatattgatattaatgaatctagatatatatatttgtctagattcattaacatcaatataaatgtaggaaatgttagaatgacttatattgtgaaatggagggagtatgtacgtatggtttcagagagttcgactgttccagaagttaagggcaatagacagttggatgcaggctactagtcattacctggtaattttctgcctttttttgtggtcattgtaagtaattcttgacaggagatcacacatgcatagctccatttcatctgcaatgtcagacgctgtcaagattaaggagtaggagttttgtttataggagggacgaaaatgtgagtgatggatagcatgatgaaatcgcaggtgcgatattgatgaatgactgcagcagcattacactaattgctatatatattttttatttaagagcagcaaggtctgtttgtaactaaaacagaaatgttttcaattaaaaaaaactaacagcacaaggtctacagcataccaagtaaactaacgctagctagaagcagccagatagatcagaaaaactcgaaaactttgcagcacaattctgtaatgtaatgtgctgataatgtatagcatgaaagactgcggcacaaatcagttccaagaaacttacaagaattaacaagcggaattagaccaaagcatcgctttttacacaaaaacaattgtaaaatcaaatttggtgcttccacataacaactgggccagggaatcttaccatactgtgcttccattaaattgagaaattcaattttgccaccacagcatgaaatccagctcgaggcatggttaagtgtactgagtaggtggcaagcaccgatccccattaaatcagcagactttcggggaggaaatccattctgcatggaaagaagactgccaatatccatggaagctaaaagtgccatggcctcgctctaacctacaaatttggacacagatttgagttaaagaactcacaatggaagcttcatcatgtgaattgaaagcgagcagatcaccgtcatgctgaactagctggacgaatcaaaccattaaatgatagacaactactaacagtgtcaatggaactgtagagcatctttcgcatgtatatataggcgcacaaaggcaattcagttcatcagctcaagcacctcaaccagttcagtcatccattctgtcttctctgcagatactgagagccaag

SEQ ID NO: 47 - DNA, 2500 bp, Oryza sativa
  source 1..2500: mol_type = unassigned DNA
aggtagcataagaccatcatctttttccctttctaatatattatactacctctatattttaatgtatgacgccgttgacttttcgtccactatttgaccattcgtcttattcaaaaaatttacttaattatcatttattttattgtgacttgattcaccatcaaatgttctttaagcatgacataaatattttcatattttcacaaaaaatttgaataaaacaaatagtcaaacattagtaaaaaaaatcaatggcgtcctatattaaaatacggagggagtagtttttctaaagtatcctgtgaatcacacgcgcatatgtagcttgcatagttacacaaaatatgcctcctttaaatgccggagctaccaaaatgggctcataatagcctgaaattaagtagtcccttcaccgacaaaacactagttactactgtatcatcaacaacgacctgaatttacagtaggggagaaacagcttgaatataagctgaaataagttgaacccataccatcatcgctagtgaagagtttgattgcagataattagttatgcttagtataaaatgcaaaaatccatctgatctataacaataggtaaataaatcacatctctaatttatttacccatgctggttctttcagaaataatatttaaatactttgaaagttgcgttgaagacagtcggcccggatattaaggttcaactttatttcttttttcatcaattagtttatgcaattctgcccaatgatattgttactagtaaattttacagacagtagccaacactgtggatttatttattccataacccatgagagagatgtgataatatgcacacactactaattcagtacagtgatttaatatcacttatatctcatcatatcttggatgtcatgtagaataccaagtcaatgcaaaatctattttctttttttttcaccattaaatctttcaccaaatcataaaaaatcttatgtggcggctagctcatttaatcctatgtaaaacatcttaggtcgagtattaggactgtgccaacagaaatactatgtgctagcccagctttcaggggcccaacaatcaccaaagtaactctgcccttcggaaaattaaaggcagccactcagacacacagtgatatccagcaaatgcacgacggatcacatggagtttcagccccagggccaatcacatcttgcgcaagtacagccgttgctggtatcttcaaccattcctctattatctcctggcctggtcctgctcagctgcaactgtaacggttagttcagtcccatacttcttccgtttcacaatgcaagtcattctaccatttttcacatttatattgatattaatgaatctagatatatatatttgtctagattcattaacatcaatataaatgtaggaaatgttagaatgacttatattgtgaaatggagggagtatgtacgtatggtttcagagagttcgactgttccagaagttaagggcaatagacagttggatgcaggctactagtcattacctggtaattttctgcctttttttgtggtcattgtaagtaattcttgacaggagatcacacatgcatagctccatttcatctgcaatgtcagacgctgtcaagattaaggagtaggagttttgtttataggagggacgaaaatgtgagtgatggatagcatgatgaaatcgcaggtgcgatattgatgaatgactgcagcagcattacactaattgctatatatattttttatttaagagcagcaaggtctgtttgtaactaaaacagaaatgttttcaattaaaaaaaactaacagcacaaggtctacagcataccaagtaaactaacgctagctagaagcagccagatagatcagaaaaactcgaaaactttgcagcacaattctgtaatgtaatgtgctgataatgtatagcatgaaagactgcggcacaaatcagttccaagaaacttacaagaattaacaagcggaattagaccaaagcatcgctttttacacaaaaacaattgtaaaatcaaatttggtgcttccacataacaactgggccagggaatcttaccatactgtgcttccattaaattgagaaattcaattttgccaccacagcatgaaatccagctcgaggcatggttaagtgtactgagtaggtggcaagcaccgatccccattaaatcagcagactttcggggaggaaatccattctgcatggaaagaagactgccaatatccatggaagctaaaagtgccatggcctcgctctaacctacaaatttggacacagatttgagttaaagaactcacaatggaagcttcatcatgtgaattgaaagcgagcagatcaccgtcatgctgaactagctggacgaatcaaaccattaaatgatagacaactactaacagtgtcaatggaactgtagagcatctttcgcatgtatatataggcgcacaaaggcaattcagttc

SEQ ID NO: 48 - DNA, 2602 bp, Populus trichocarpa
  source 1..2602: mol_type = unassigned DNA
aacagcctgtgctgtcaaagagaaaccattgtgtattttcttttcattacaaaatctaccatcttactcactagtacaagatctaaatactccaacaagagcttgatcttgttttcaatggtctggtgtaagacaccattaatttatttgaaatggggatatgagatataatcaaatagtggaggttgtgggctagcagggctcaaatctttatggtgtattggaccaaacaaaattggggcaggatatcattgttcttgggctcaatatttgttagcttgtccgatgagagaatgaataggaaggcaccccccccctgtgtctcttctcttccagatttaataaattagaggaaaaaaacttaatgtgccgctcgggaaatgaatcatttctagtggtttaagtcgggaccagctgaacggagtctctgaaaaaaaaaaaacgtagtcctgaattcaaacagcttaaagtctaagagataatgaaacacggtgagggttcaatcccatggcatggagcaagttgagacatgggttttgatcagttttattgaggttggaattgaatgtcacattcatcactcggggatgttgcagcaccagatggccttacaggaaaatcatgtctatgtgcttttgagcctacttctatagtttaatctcagcttgtcaaatgaagtcaacttgatcctacagtatcactgtatatgaacttgttctataatcttgtcatattggtggtgaattttttttctaatgaattttgtgaagaccatgttataaaaagactcctaacaatgcctagatcaccacaataaaatggcatggtgaagaaaaaaataaaattatctttaatatggcgagaaacatacttaaaaccaagaaaatgccaaatgaattttgggttgaagttataaattatgttatttacttgttaaataggttttctatgaaaagcttaaatgacatgactctattataaaaagcatgcatggaatggaagaaagtcaagtgttactcatttgaaagtaattagaagcattgactatatgcatgcagatgatcaagtaaggaccaaattagatgacaaaagcaaaaaataatctttgtgagctataatcaaaagtcaaaataatacaagtttcacaaccctaataaataaaaaatgatgattaatagaaatgtcgaatttgatgaagaaagagcatgaaattagaaggtagacgatgttgagaagtatgaatttctaccagtttttgatgaagagatataaagatcatcaataacttgttacacctccacaatcatcaataaactcaacttcacctttatcctcttcttcttttagtagaagttccagtagtggcagctcacttagttaatatagaaagatgaagagtcttgatgacttgtataagataattaatccaattgatgatgatctatcactatattgtcatcttgctacatgtaaatctttagtgtttgtaaaagaaataaatgatgaaaaatagagaattgctataaataaagagattgcatcaactgagaagaatgacacatgaaaatttgttcctagaccaaaaagaaagaagacaataggctaagaagaagcaacctatagtcacattattaacttgagaagatgaatatgtatctactacaacaagtgtttgtcattccatatggctaagaaaattattgaaagagttatgaatgccacatgagaagcctacaaaaatttatataaacaactcattagtcattgctttaactaagaatccaatatttcataactgaagtaagcacatacacacaagatttaatttccaataagattgtattacaaacaagaaagttgaagtcaaatatataaaaacacaagatcaagttatagatatttttataaagccactcaaatatgatgtttttgtcaagatgagaaatatgctatgagttataaagaaatcaattttaagaggggatgttgaaagtaaactagattttagtttttttgcaaaatagaagaatcggtcgatcggttcagaaacaattaaccaataaagacgacataatacattttcttatttgcctagaacctgaggtttataaataaaattttaatctaaggaataattaatatatgtaaagagaaaatctaaggaataataaaattgtttttttattgaatcctcttcttgttttttagttttacttattattttgctgttaataaactcctgccacacttattattattttttttttccaatataataattcatttcgtagtaaccttggcaaaacctccatggcaatggtggcaattcacacatcagagttcttaaaacgagagaacaatccattagcaagagtgagcttgggcatgtggcgggggttggattaattgcattatcgcatcagtgcaagtcattaatagcacaaattaatgctccggcaacaaatcaactaaccacatactccttcacctgctaatatttacttcactctgtcaactctatataatccccgctttcttcactgaagaatgcacctttcagttatatcccaacttacttctagtgttctccaagaatattgag

SEQ ID NO: 49 - DNA, 2500 bp, Populus trichocarpa
  source 1..2500: mol_type = unassigned DNA
aacagcctgtgctgtcaaagagaaaccattgtgtattttcttttcattacaaaatctaccatcttactcactagtacaagatctaaatactccaacaagagcttgatcttgttttcaatggtctggtgtaagacaccattaatttatttgaaatggggatatgagatataatcaaatagtggaggttgtgggctagcagggctcaaatctttatggtgtattggaccaaacaaaattggggcaggatatcattgttcttgggctcaatatttgttagcttgtccgatgagagaatgaataggaaggcaccccccccctgtgtctcttctcttccagatttaataaattagaggaaaaaaacttaatgtgccgctcgggaaatgaatcatttctagtggtttaagtcgggaccagctgaacggagtctctgaaaaaaaaaaaacgtagtcctgaattcaaacagcttaaagtctaagagataatgaaacacggtgagggttcaatcccatggcatggagcaagttgagacatgggttttgatcagttttattgaggttggaattgaatgtcacattcatcactcggggatgttgcagcaccagatggccttacaggaaaatcatgtctatgtgcttttgagcctacttctatagtttaatctcagcttgtcaaatgaagtcaacttgatcctacagtatcactgtatatgaacttgttctataatcttgtcatattggtggtgaattttttttctaatgaattttgtgaagaccatgttataaaaagactcctaacaatgcctagatcaccacaataaaatggcatggtgaagaaaaaaataaaattatctttaatatggcgagaaacatacttaaaaccaagaaaatgccaaatgaattttgggttgaagttataaattatgttatttacttgttaaataggttttctatgaaaagcttaaatgacatgactctattataaaaagcatgcatggaatggaagaaagtcaagtgttactcatttgaaagtaattagaagcattgactatatgcatgcagatgatcaagtaaggaccaaattagatgacaaaagcaaaaaataatctttgtgagctataatcaaaagtcaaaataatacaagtttcacaaccctaataaataaaaaatgatgattaatagaaatgtcgaatttgatgaagaaagagcatgaaattagaaggtagacgatgttgagaagtatgaatttctaccagtttttgatgaagagatataaagatcatcaataacttgttacacctccacaatcatcaataaactcaacttcacctttatcctcttcttcttttagtagaagttccagtagtggcagctcacttagttaatatagaaagatgaagagtcttgatgacttgtataagataattaatccaattgatgatgatctatcactatattgtcatcttgctacatgtaaatctttagtgtttgtaaaagaaataaatgatgaaaaatagagaattgctataaataaagagattgcatcaactgagaagaatgacacatgaaaatttgttcctagaccaaaaagaaagaagacaataggctaagaagaagcaacctatagtcacattattaacttgagaagatgaatatgtatctactacaacaagtgtttgtcattccatatggctaagaaaattattgaaagagttatgaatgccacatgagaagcctacaaaaatttatataaacaactcattagtcattgctttaactaagaatccaatatttcataactgaagtaagcacatacacacaagatttaatttccaataagattgtattacaaacaagaaagttgaagtcaaatatataaaaacacaagatcaagttatagatatttttataaagccactcaaatatgatgtttttgtcaagatgagaaatatgctatgagttataaagaaatcaattttaagaggggatgttgaaagtaaactagattttagtttttttgcaaaatagaagaatcggtcgatcggttcagaaacaattaaccaataaagacgacataatacattttcttatttgcctagaacctgaggtttataaataaaattttaatctaaggaataattaatatatgtaaagagaaaatctaaggaataataaaattgtttttttattgaatcctcttcttgttttttagttttacttattattttgctgttaataaactcctgccacacttattattattttttttttccaatataataattcatttcgtagtaaccttggcaaaacctccatggcaatggtggcaattcacacatcagagttcttaaaacgagagaacaatccattagcaagagtgagcttgggcatgtggcgggggttggattaattgcattatcgcatcagtgcaagtcattaatagcacaaattaatgctccggcaacaaatcaactaaccacatactccttcacctgctaatattt

SEQ ID NO: 50 - DNA, 2134 bp, Setaria italica
  source 1..2134: mol_type = unassigned DNA
tttggaccatgtttagttcctccaaaactcccaactttagcactatgcaaaaagaagattctccatcacatcaaacttgcggtacatgcatggagtactaaatgtagacgaaatcaaaaactaattgcacagttttgttgtactttgcgagacgaatcttttgagcctaattagtcaatatttggacaataatttacaaatacaaacgaaacgctagtgtgctacagtgctacaacagtaattttgcacctccaaactttggccaaccaaacaagatcctatatatcggagttcgttctacgacgacttgcactacatgccccgtttaaatgctcagctagtcagctaccaaaatgggctcataaagtcataatagcagcggactccttccaccgacaaactcccaccctcctctagtcacccgcagcatgccaacatgaatttcagctgaaacagagctgcaccaccacccaagcacgcaaacaaatttgagcaagtaaaattaattgcaccgcaagaacagtaaatgcaagtactgttagtatattcggccaatgagaaatgaacgcaggagagatgtttttcgtacatgtgctttcttgaaggacccctcgcatcaccactcatcaatggaactgcgtgttcaaaaatggcggccacagagcagcagccgctagcttccgtctgtccgggcccccgaactctctgtaaagctccggcagatccacaagagatcacatggcagcccgatctccccggggccaatctcctcttgagcaagaccagctgctggcctctcgcgtccttgtgcttcctccttgattggaaggcagcctggtgttaaaggtgagagcacagtaaatttggtttggtactccttccgttccaaattgtaggtcattttaattttttagtttataaatattattatgcacctagacacatgtttctgtagttgtcttcctgtaaggaaaaggaccttgcaaattgaacccatgtactgatggtcatttctgaacttcgcacatgaggtcagtacggtcagtccatgtcgtagtaattccgaaggaaactgcacatgaatgactcatgtatgatgtatattagtaaaatgctgccatgatgtgaaccagcaatacgatagcatgtgcgacgatgttgtacaaaacagaggaggcccttgtaaaagacagacggcattacattcaggggctaaaaacatggtaccatacaggtgagatatgatggatgaatgcgggcagcagcccactgcgactacagtatacgcactaaaacctcggcagatgcaatcagaataatacacagaaacgcagaggactatcagactatgcaccagtattctgacagagtataagcacacttttgaatatgcagcagtaaaagatgcagtgaaatcagttttaaagaagttaccagattttccagtaaagatatgagacttgtgatgaaatctggccaaatcctgtgcctttcagttggatcacaaaataccttcagccgctccatagttattcagaacaaactcgagttagatccctcgaccctctgtttcgctggaccagccaaacccatgtttccattaataagttcgatagattcggtatttcaattcagggatcagatcgccgaatccagctcgaggtatagttaggtacactgagtaggtgggaggcaccgattccgattaaatctgcagtctgggaatagaaaagatcctcattttctgtcaaaagatgcctgcccaaaatccacgaagctctaagctatcacagttcacagccttagtgcccttttcctttttttttgcacaatatttgtagaaaagaatttgggctaaaatactcagtaccttcattatgctagttgagagcaagcagatcactgccgtgacaagctggacaaaccaagatcattaaatgttggccaactactaacagtgtgatgaacatgtacacatctttgcacgcaatagcttcaatggaactgtggagcactgctcgaatgtatatatatgtgcctgaagggaactcagttcatcaactcaagcatctctaggttctcaaccagttcttaggccacatattcagtcttgtctgtagacgttgagagcaag

SEQ ID NO: 51 - DNA, 2056 bp, Setaria italica
  source 1..2056: mol_type = unassigned DNA
tttggaccatgtttagttcctccaaaactcccaactttagcactatgcaaaaagaagattctccatcacatcaaacttgcggtacatgcatggagtactaaatgtagacgaaatcaaaaactaattgcacagttttgttgtactttgcgagacgaatcttttgagcctaattagtcaatatttggacaataatttacaaatacaaacgaaacgctagtgtgctacagtgctacaacagtaattttgcacctccaaactttggccaaccaaacaagatcctatatatcggagttcgttctacgacgacttgcactacatgccccgtttaaatgctcagctagtcagctaccaaaatgggctcataaagtcataatagcagcggactccttccaccgacaaactcccaccctcctctagtcacccgcagcatgccaacatgaatttcagctgaaacagagctgcaccaccacccaagcacgcaaacaaatttgagcaagtaaaattaattgcaccgcaagaacagtaaatgcaagtactgttagtatattcggccaatgagaaatgaacgcaggagagatgtttttcgtacatgtgctttcttgaaggacccctcgcatcaccactcatcaatggaactgcgtgttcaaaaatggcggccacagagcagcagccgctagcttccgtctgtccgggcccccgaactctctgtaaagctccggcagatccacaagagatcacatggcagcccgatctccccggggccaatctcctcttgagcaagaccagctgctggcctctcgcgtccttgtgcttcctccttgattggaaggcagcctggtgttaaaggtgagagcacagtaaatttggtttggtactccttccgttccaaattgtaggtcattttaattttttagtttataaatattattatgcacctagacacatgtttctgtagttgtcttcctgtaaggaaaaggaccttgcaaattgaacccatgtactgatggtcatttctgaacttcgcacatgaggtcagtacggtcagtccatgtcgtagtaattccgaaggaaactgcacatgaatgactcatgtatgatgtatattagtaaaatgctgccatgatgtgaaccagcaatacgatagcatgtgcgacgatgttgtacaaaacagaggaggcccttgtaaaagacagacggcattacattcaggggctaaaaacatggtaccatacaggtgagatatgatggatgaatgcgggcagcagcccactgcgactacagtatacgcactaaaacctcggcagatgcaatcagaataatacacagaaacgcagaggactatcagactatgcaccagtattctgacagagtataagcacacttttgaatatgcagcagtaaaagatgcagtgaaatcagttttaaagaagttaccagattttccagtaaagatatgagacttgtgatgaaatctggccaaatcctgtgcctttcagttggatcacaaaataccttcagccgctccatagttattcagaacaaactcgagttagatccctcgaccctctgtttcgctggaccagccaaacccatgtttccattaataagttcgatagattcggtatttcaattcagggatcagatcgccgaatccagctcgaggtatagttaggtacactgagtaggtgggaggcaccgattccgattaaatctgcagtctgggaatagaaaagatcctcattttctgtcaaaagatgcctgcccaaaatccacgaagctctaagctatcacagttcacagccttagtgcccttttcctttttttttgcacaatatttgtagaaaagaatttgggctaaaatactcagtaccttcattatgctagttgagagcaagcagatcactgccgtgacaagctggacaaaccaagatcattaaatgttggccaactactaacagtgtgatgaacatgtacacatctttgcacgcaatagcttcaatggaactgtggagcactgctcgaatgtatatatatgtgcctgaagggaactcagttc

SEQ ID NO: 52 - DNA, 3000 bp, Arabidopsis thaliana
  source 1..3000: mol_type = unassigned DNA
ttctgtaataaatacgtattagaaaatgatgaagatattagatattctctcgaaatcaagtcgagggccattaaaattgatgattattagaaaaaaggttataaatacttagttggaagacctagctagctaataactaagaaaattaatagaagaaactctctcttattgatatgtcgtcgtccatgcttctatattggatatagttctcgcatatgagtaaatctactatcattaatacaaaaacaataatatcaaacgcttaattagcatttgaacaataaaaatcatttatgtattcatgcataatttagacacacacacacacgcacacgcacgaatatatacatgttgtagtacactagcacttaggtctaaattttgagaactacgcaatatgacaagtaactaaatctttgttaacctaactaatgcgttgttgttgacatagatgaggtacgaaatggttgtaatatgaattcttatacacattagtatatgtggaagccaagtagccaacgaaacacttgcatgtaaatttttttgattattctttacaagcttaaacgttttttatttaacctatagaggtaaaagaaaaacagtgattttggttttgacttatataaaccgaaactctttctatcactctatagagataaatatacaaagaaatgagtaagtttctctcactatagcattaatggagctttagatcatcataaatgcattgcaccctctctatgcgctcatcaataactccttttaaatttcttattgcaactccacctgttcttttccttcctctcttgtcctcttctccttcttcttcttcaacaacaaacttccattgttcttaatacctagctagctcttccccggtttgagattatcccaaaataacaccggttctcgggtaaccggtcggtttttccggagcaaccaacccttttacttctctttatcattgtctcagatcttctgttcttcaaaggcaaaaatgggcataaaccaaagatcattgtgaattagggtttcactgtgtctccaaaagtaagatctctattatcaaaaaagatctttctctctctacacatatatgtatgcatatgcatttgtgtgtatgtatcttaggttatgtttatagatcggatccatattgcatgttgttgagactcttagatcttctatttttttgtttatggtgttttttggttctcaagatctcgatgcctatgatttgtttttttttctagattattttagtttaatttaatttaatgttttttgtgtctttttgcggagacttatgatctaagataaataaagcgttaccaaaaactttcttggagttagcagtttcaaaaggggtttgacgaaatctacttggtggttgtgtcacaaaaaaaagaccattgacttattgtcaacgctttaattaaccctatatactatatactatttttaatcgcttttaattaatcaaccctatatatcctgtattaaactaattaaacttagcctttttcattagttttgttactggaaacggttcgtctttagtgcacaaagaccaaggtcaatttaattctttaataaattcaattgagagatcagaagcttgtgaatctggttctctctctctcttctcttactagcttttgagtcgacaaaagagagagaaaagatcattaaactcgaatccaaaacttcaaccaacaaaagggaaaaaaagaaaaaataactacaaagagatctatctttagggtttcaaaactttcttgagtttcagatcgaattgagtaagtatttatattatttaagtgttcttcttactgtatcatttctgaccatacaccaaactagggtttcttaaagatcataactctctctctctcgcttcttcctacactagatctgtccgatagatctgatgctttgagaagtcttgtgactttcaagattgatttttctttttgtttgtttgtttatatgtacacatacttggagatagatatactctcatatatgttactgtgcatatggatggatccatcttaagtgtgaataaaaactacccaaatctcatttttgtttgtttcttatctcatttgttgtttttgtaaggccgtcattataaatctaaaacaatttatccgttttcgtaaagaaaatcgctttccaaaaaaaaaaactttgaagtaaaaatatcattttgggtctatattcaaatctctcctcatatttccatctcattatttgtaaaattaatatattaggtcattatcatattgattatagagtttatatgttatgttataaagtaaaagttatatatgtaaatattacgtttgtaatatatatatttatacatatgtacgtatacataatttgtatgtatatgtgcctcatttttaacaaatattatcgttaatctttagtttcattataattttttagggatgtatacattatataaatattttatgttatttatatctgaaatttctatactataacatcttagatagttttcatacgtaattaagagttttaattaatagttacataattatgattagatgaatttatctataaattgtatgcaaaaatatatacatatccaaccgaaaaaatggagagtaaacaaaaacctaacaattaatggtttagtacttgtgaaaatgataaaattattaatttaatatatagtttcataacagctagaaataactttcccttaatataattattttcttccatttccataatgattttcttcttcttcattctgtatacatatatgagcgtttcatatataatcttttactaattcgattgtgattttgattttgggcagtggaagatatacttggagaagaaaatcaaatcacgaaaatatattgatcagtgccttgaaggaaaccaaagttgacaactccaaaaatccatttcgttattaatatctaactgagtgatcatagtcaatcatccataaca

SEQ ID NO: 53 - DNA, 6237 bp, Glycine max
  source 1..6237: mol_type = unassigned DNA
taatattattatcagtggagtcacgtaggaaaatgaaagtagaaaaagtgtttgcggagaagaagaacataatgttgtgaaaaattaggattaataatttttttatttaattttttaataactaatgattttgattaatttataattaacttaataactcaattaattataagtatttattaataatctatcagaatgatcaaaatcactaatttataagatttgaggatcaaatgttataattaaaattcaggagacaacaatcataaatttgagaaactagatgactaaaaattacaattaaaatttaggaattaaaatcatggatttgaaaaattaggatgaccaaaattataatttaaccttcttttataagaagaaatttaaaagtctccttgcattaaatatttttttgaaaacattattaattatgaaccatttttctgaaattaggatgaccaataggtagaatattaatatttttttccttttcatatgtagagaatttacagaaatcttattgtgtactatctttacatctataaacaataaaaggtagagcaataaacatatttacagattaattaaacgacataaagacaacaaatatactaaacaaaaagaataaggacatgtttcattactattataggtaattttgaaaataatatataaatttagaataaatatataattattaatttaattaattatttttttaatctttatgaattagttgattgaattttataaaaagatcaaaagggagcggttaatttgtagatgacttgttattcatgagaaactaaagaaaaataagaattaatgatataaatattaatcattcaattcatcttgtatttactaaatcaatcaacaaattaatttaaatcagaaatctgatgttaattaaaatgacattattttctaaaatattgttaaatccttttactattaatgaattatataagaatcaaatttaaataaatataattattgtttagtgactaattttatcttataaaatgagtttaatatttatacactcatagtatacaagagttttacattatcatccaatcatgaattccgtttgaattactttaaaataattatttgaaaagtcaataaatttaatatatatgatgagtttaattaaatgaatatataaaactttttgcataatatcaatatataataattttctcttataaaaatagtatgtaagataattttctctcattatgattatatactaatacatttgttaaaaaaattataataacgatatactgtatcaaaattaaactcttataaaattgttacgaaataattaaatgttaaaatagagtctttctattgtaaatatatttaaatcaatatttaacaccaataaacaataaacattttgtttataaatattttaattatggctaatgttaaccctttttattgtgatccacaaaattatattgtcatgatttttttacgctctcgtattcttttttttttttgacttaattatttttttaacccctgaatttaagtcgtgtattttttttagtctttaaaattttttaaaaaaattctctgaattttgacaaatgatttttttttgacataataaattgatattttatgtcaatttttagtactttgtgaaatttttttagtatttcgtaatagtttcaaaatgaaaatttaaaataaactaatattatgatttaatttacagaatcaatccatttttttgtcaaactcatttcaacatcttgtaaaataagtataataattaatctttactatcaaaactagttttaagcccggcttaactaattattattttagtttctaaattttggatttgtgatttttttagtccttaaaattttaaatttatttctttgtttctgaattttgataaattattctttttagtcagagccatgtaaattgatattttgtgataatttttaactacttaaatttttaataaaaaaaccatcacaaagtgttaaaaaccaccatataatacagtgttagtttataagtaagagattaaaaaataaatttgtcaaaatttaaggattaaaaaaatatttttaaattttagagattaaaaaaatacactccaaattcaagaactaaagcaataattaagttttaattttttaaccaataacctaataacactcaccaattagcaagaccgtgaatacttgttaactttttaatttgaaaggcaagagtagaaggcagtgtaaggggctagggttgagaaatataagagtcacttcactggacctagctcacaaaataaaagttaaagcatggaacgatatcgcgctctaactctcttctattcatgtataaccatttaattaaatttacaccagtcatccctccataaatgcttctacaccctctgcaataacttcatgctgccaaaccctctcccacttgttctacttattcattttatctcttcctgcgtcgtttggttctatctctatttcgctttggcccacactaaactcacaacttccccatcaacaactccttcacttccctaattccccacacacattcttgtttctctgatgacccacaacacatccgtttcagtcaacaacataactaattaaggttcattccactctcaaacgcttaaggccccctcttgcatctacgcattcttaattttagctttgacttgctttgcttagcttagttaatttccgagtgagagaaaggggtaacggctacgttcccccgcattgaaattggttacttgacaagcgttatagtaatcatctgttttgtcaaacctttcacactgactcaacactctacccttattttgtcttttctgatttccctagcattgcaagttttgcgtgtaagataagagtagtaaggccaaggccagggaaagtcagcagtgtcctcttgcaaccttaacataagaatgaatctccagacaaacacttgaaagtgctcgaaatcgatcgatcagagacaaaacagcgacacgaggggcctggatgcttttattatcaatttttgctttgcgtggcggttccataaatcccaattgcaagtcccatcaaactttagagatggaaagcggttgattcattatattgcagtcgtcttcgtggttaatctatcaggtgatcacttccttaatttcttattttctctcataattaaacagaggtacaacaaattttcttttttgagtaaaacagcaagttgattaaatggaaaaactttaacattttattcattctcgatggggagaaaagtcattctggcttagaatttttttacatatatacagttgctattgttatcacatatgttcatcttaatgttttattgccaacaaagtttggtattttagcaatctacaagtatttctgaaaatgtttttttaggtgtgtcatggctttggttgaagctcaccttatttaaatttttttttttgaaaataatctacgtttcatctcgactaaaaataatcacacattaaaatatataagtgagagagacaattcttattccttaagttaatttttaggattaagttagacttctcacattctaagatcttattaatgtgagagacaactctcattctctcacttactttattgtaagaattttattctttctttatttttatgataagaaagtgttaatttttaatgtttattttagagagaaaaaaagtttctattgtgaggcccaggagaaaaataaattccttacctccccaaattggcatgaaatgggtgaggggaaaaatgatctcttactaatttttattttagttttcttaatatatatatctttaaaaatagttaaatataaaacaattttatttttaaagataagtatatttttctattagaatgaaaaatataactttttataaggtgtttggctatttggtgtttccataagcatcgagaataacttaaactctttatcctttttctaaatatgcaaattaaatcaaactcaaggatcatcctataccttttttagttagcatgttattggtataaaatatctacttgttttaccaataatcaattttcatccacaaatcttaaatctaagactttatttatttaaaggaattgagtcaaatataacttcgaccaacatcttggaaatatttatttatttatctaagtaattacaagaaaaaaattctctgcgtttttgttatttccatttatcaaaataacgcatctttgctactctattaatttttttttctttttttctttcttattttttctgtattttatttctaaatcaaatagaacattaatatgtttctatctaatcttttgttacccataataatcataaacttaaaaaaatttctgtgtaaactaaacttgtagttttaaaacaaaaaataaattccatttgtctactcaattaataaataattctaaattatttaatattctctcagtgtttatattttaacatctttaaatatcaaacactctattaacactcttaatttatctctatcattcttttagtatctcattgtctatcatatcgatgtttctctctcttttatttccatctctcaagatatcaattaaatttgggtgtttgaagactttttaccatattaattttcctactttctttttattttttcatcttgctcaatcattcgacttaactgacttgactactttctttttatatggtgagtatttaatgtgttttatattttaaaaacattaaatattttatatttatttttcatttaatacttttttcgtatggtaataatattcttttcatttaatactttttttgtacggtaacacttttttcaatttcaaccaatacaccttcacgtaaaaatattaaaaaaacaattaatttgataaataatttagaaaaagatattagttaaaaaatacatgtaatacttttaatcaataccgattatattttgtctttatactaattaatcaataccgattatatttcctctttaagtctttcactataaattgaattcgagtaatgttgtatgagaaatgcaaggaagacattttttaacaaactcttgatgatttccttaaaaaaaatacttcttttataattgattgaaatttataggaaatcataattttttggaatgctaggaacattctctttggcacactcctttaaagattctttgtatatacgattgactaaagtttattgaacaattttgataggttttaatttttatttaatataaatcaggagagagtatgaaaaataaaatgtaataaaaatgatgattttcattaaattctaaggaaatattaaaaaaaaaagcgttaaagaaagtgatgttaacatttatggtattcactaccaagcacattaattagtaatctttttaatttgagttgtgatagttgttttatccttgtaaaaaaaattctccaataaaaagtattagtatttattttttatataagattcaatttataattttttattttgattatttttaaattaaattgcctctaaataagttattatattggaaaaattaattgagatgagagaatttattatatgtcagaaatacaaatgtatttaatatttacttctacaaaaaataatttaaatacttaattgaatatgttttttaggtacatccttaattgaatatgtttaaaaatttctaagaaatttgagggtaatagttaataagatgcatagttttctttttattattactgatagttattaagtaaaaatatctatatttttcatatttttagatgctaaaagtattggattcttaatatttattattttaatacaatttaaaaatttatagaaagttaatattagaaaaatataattaatttaaaattaagaatagcattgctcatttactattttactaaaaatataaaatattatctgtcaagaaaatattaaatattaactatttaccttaggtagttatgaacattcaatgtattaaacttctaacgtatattatattgattattgaagttgttcaaaaaatattcttaagggcactcgctatagggctacacaaactagcctacttcttgctttcccacatttttgcttccgtcgggcgagttaaatgttttagaattcctggtttggcagagactagctagagaagaaaattgcggcttccgaattatttaagga

SEQ ID NO: 54 - DNA, 6192 bp, Glycine max
  source 1..6192: mol_type = unassigned DNA
taatattattatcagtggagtcacgtaggaaaatgaaagtagaaaaagtgtttgcggagaagaagaacataatgttgtgaaaaattaggattaataatttttttatttaattttttaataactaatgattttgattaatttataattaacttaataactcaattaattataagtatttattaataatctatcagaatgatcaaaatcactaatttataagatttgaggatcaaatgttataattaaaattcaggagacaacaatcataaatttgagaaactagatgactaaaaattacaattaaaatttaggaattaaaatcatggatttgaaaaattaggatgaccaaaattataatttaaccttcttttataagaagaaatttaaaagtctccttgcattaaatatttttttgaaaacattattaattatgaaccatttttctgaaattaggatgaccaataggtagaatattaatatttttttccttttcatatgtagagaatttacagaaatcttattgtgtactatctttacatctataaacaataaaaggtagagcaataaacatatttacagattaattaaacgacataaagacaacaaatatactaaacaaaaagaataaggacatgtttcattactattataggtaattttgaaaataatatataaatttagaataaatatataattattaatttaattaattatttttttaatctttatgaattagttgattgaattttataaaaagatcaaaagggagcggttaatttgtagatgacttgttattcatgagaaactaaagaaaaataagaattaatgatataaatattaatcattcaattcatcttgtatttactaaatcaatcaacaaattaatttaaatcagaaatctgatgttaattaaaatgacattattttctaaaatattgttaaatccttttactattaatgaattatataagaatcaaatttaaataaatataattattgtttagtgactaattttatcttataaaatgagtttaatatttatacactcatagtatacaagagttttacattatcatccaatcatgaattccgtttgaattactttaaaataattatttgaaaagtcaataaatttaatatatatgatgagtttaattaaatgaatatataaaactttttgcataatatcaatatataataattttctcttataaaaatagtatgtaagataattttctctcattatgattatatactaatacatttgttaaaaaaattataataacgatatactgtatcaaaattaaactcttataaaattgttacgaaataattaaatgttaaaatagagtctttctattgtaaatatatttaaatcaatatttaacaccaataaacaataaacattttgtttataaatattttaattatggctaatgttaaccctttttattgtgatccacaaaattatattgtcatgatttttttacgctctcgtattcttttttttttttgacttaattatttttttaacccctgaatttaagtcgtgtattttttttagtctttaaaattttttaaaaaaattctctgaattttgacaaatgatttttttttgacataataaattgatattttatgtcaatttttagtactttgtgaaatttttttagtatttcgtaatagtttcaaaatgaaaatttaaaataaactaatattatgatttaatttacagaatcaatccatttttttgtcaaactcatttcaacatcttgtaaaataagtataataattaatctttactatcaaaactagttttaagcccggcttaactaattattattttagtttctaaattttggatttgtgatttttttagtccttaaaattttaaatttatttctttgtttctgaattttgataaattattctttttagtcagagccatgtaaattgatattttgtgataatttttaactacttaaatttttaataaaaaaaccatcacaaagtgttaaaaaccaccatataatacagtgttagtttataagtaagagattaaaaaataaatttgtcaaaatttaaggattaaaaaaatatttttaaattttagagattaaaaaaatacactccaaattcaagaactaaagcaataattaagttttaattttttaaccaataacctaataacactcaccaattagcaagaccgtgaatacttgttaactttttaatttgaaaggcaagagtagaaggcagtgtaaggggctagggttgagaaatataagagtcacttcactggacctagctcacaaaataaaagttaaagcatggaacgatatcgcgctctaactctcttctattcatgtataaccatttaattaaatttacaccagtcatccctccataaatgcttctacaccctctgcaataacttcatgctgccaaaccctctcccacttgttctacttattcattttatctcttcctgcgtcgtttggttctatctctatttcgctttggcccacactaaactcacaacttccccatcaacaactccttcacttccctaattccccacacacattcttgtttctctgatgacccacaacacatccgtttcagtcaacaacataactaattaaggttcattccactctcaaacgcttaaggccccctcttgcatctacgcattcttaattttagctttgacttgctttgcttagcttagttaatttccgagtgagagaaaggggtaacggctacgttcccccgcattgaaattggttacttgacaagcgttatagtaatcatctgttttgtcaaacctttcacactgactcaacactctacccttattttgtcttttctgatttccctagcattgcaagttttgcgtgtaagataagagtagtaaggccaaggccagggaaagtcagcagtgtcctcttgcaaccttaacataagaatgaatctccagacaaacacttgaaagtgctcgaaatcgatcgatcagagacaaaacagcgacacgaggggcctggatgcttttattatcaatttttgctttgcgtggcggttccataaatcccaattgcaagtcccatcaaactttagagatggaaagcggttgattcattatattgcagtcgtcttcgtggttaatctatcaggtgatcacttccttaatttcttattttctctcataattaaacagaggtacaacaaattttcttttttgagtaaaacagcaagttgattaaatggaaaaactttaacattttattcattctcgatggggagaaaagtcattctggcttagaatttttttacatatatacagttgctattgttatcacatatgttcatcttaatgttttattgccaacaaagtttggtattttagcaatctacaagtatttctgaaaatgtttttttaggtgtgtcatggctttggttgaagctcaccttatttaaatttttttttttgaaaataatctacgtttcatctcgactaaaaataatcacacattaaaatatataagtgagagagacaattcttattccttaagttaatttttaggattaagttagacttctcacattctaagatcttattaatgtgagagacaactctcattctctcacttactttattgtaagaattttattctttctttatttttatgataagaaagtgttaatttttaatgtttattttagagagaaaaaaagtttctattgtgaggcccaggagaaaaataaattccttacctccccaaattggcatgaaatgggtgaggggaaaaatgatctcttactaatttttattttagttttcttaatatatatatctttaaaaatagttaaatataaaacaattttatttttaaagataagtatatttttctattagaatgaaaaatataactttttataaggtgtttggctatttggtgtttccataagcatcgagaataacttaaactctttatcctttttctaaatatgcaaattaaatcaaactcaaggatcatcctataccttttttagttagcatgttattggtataaaatatctacttgttttaccaataatcaattttcatccacaaatcttaaatctaagactttatttatttaaaggaattgagtcaaatataacttcgaccaacatcttggaaatatttatttatttatctaagtaattacaagaaaaaaattctctgcgtttttgttatttccatttatcaaaataacgcatctttgctactctattaatttttttttctttttttctttcttattttttctgtattttatttctaaatcaaatagaacattaatatgtttctatctaatcttttgttacccataataatcataaacttaaaaaaatttctgtgtaaactaaacttgtagttttaaaacaaaaaataaattccatttgtctactcaattaataaataattctaaattatttaatattctctcagtgtttatattttaacatctttaaatatcaaacactctattaacactcttaatttatctctatcattcttttagtatctcattgtctatcatatcgatgtttctctctcttttatttccatctctcaagatatcaattaaatttgggtgtttgaagactttttaccatattaattttcctactttctttttattttttcatcttgctcaatcattcgacttaactgacttgactactttctttttatatggtgagtatttaatgtgttttatattttaaaaacattaaatattttatatttatttttcatttaatacttttttcgtatggtaataatattcttttcatttaatactttttttgtacggtaacacttttttcaatttcaaccaatacaccttcacgtaaaaatattaaaaaaacaattaatttgataaataatttagaaaaagatattagttaaaaaatacatgtaatacttttaatcaataccgattatattttgtctttatactaattaatcaataccgattatatttcctctttaagtctttcactataaattgaattcgagtaatgttgtatgagaaatgcaaggaagacattttttaacaaactcttgatgatttccttaaaaaaaatacttcttttataattgattgaaatttataggaaatcataattttttggaatgctaggaacattctctttggcacactcctttaaagattctttgtatatacgattgactaaagtttattgaacaattttgataggttttaatttttatttaatataaatcaggagagagtatgaaaaataaaatgtaataaaaatgatgattttcattaaattctaaggaaatattaaaaaaaaaagcgttaaagaaagtgatgttaacatttatggtattcactaccaagcacattaattagtaatctttttaatttgagttgtgatagttgttttatccttgtaaaaaaaattctccaataaaaagtattagtatttattttttatataagattcaatttataattttttattttgattatttttaaattaaattgcctctaaataagttattatattggaaaaattaattgagatgagagaatttattatatgtcagaaatacaaatgtatttaatatttacttctacaaaaaataatttaaatacttaattgaatatgttttttaggtacatccttaattgaatatgtttaaaaatttctaagaaatttgagggtaatagttaataagatgcatagttttctttttattattactgatagttattaagtaaaaatatctatatttttcatatttttagatgctaaaagtattggattcttaatatttattattttaatacaatttaaaaatttatagaaagttaatattagaaaaatataattaatttaaaattaagaatagcattgctcatttactattttactaaaaatataaaatattatctgtcaagaaaatattaaatattaactatttaccttaggtagttatgaacattcaatgtattaaacttctaacgtatattatattgattattgaagttgttcaaaaaatattcttaagggcactcgctatagggctacacaaactagcctacttcttgctttcccacatttttgcttccgtcgggcgagttaaatgttttagaattcctggtttggcag

SEQ ID NO: 55 - DNA, 1999 bp, Zea mays
  source 1..1999: mol_type = unassigned DNA
tcggcctgtccattattgtaggaatagctagccgcccatgcaagttctattcagcctgccttttcatcgctctgaccaccatgtcctcatctgcgtgagatgtgctatcaatagttggacacaattcgtcctcaagctacgacggggacagtttgacattaccagagagagagagagagagagagagagatagagtgctagcaataggaggggatgcaaaaacatgtaccacctcaccgttctgtcgtacttccctctgatcaacttcacaacgttcaaatttaggcaaggcgctgtggctgaagtttacaatattctgcaccacctcactgtcttttgtagttccttctgatcagctttaagttgttccaattcaggcaaggcgctgtgggttaagttgacaattgttacctcagcttgatcaacagatgacactttttttttttggtgaagaagtgttggcttccgggtcacaagagtatcctctcctctgtactgtttctgaaacttgttgccttcctgtccattgtggcgattaggccggggttaaaaattcccagtttcgataacgattgctcgttgctgggttagactttgcacagaaatcttccgctcgaggagggggtttagttattaattacccacagtgatgagagtgacgtacgctgtactagaatttttgcgaatgactgacagtaatgacatcatcgtccctgacaataatatccaacatccaacgcccccacacttatattccagtccaggcatattgtatatgaacgagcgagcacgcacggtacgtacgtgtgcggtgtgtccgccggcgcctaccaggacgtagtacaacatcgccatctgagcccatgacgcccgcccagcgccagcgccagcggcacggcaaaagtcgccggcgccagcaagaacagcaggaagcacaggtttcaaagggggcgccgcgagccagggcccaggaccagcagcacgtacagagcgggagtaataaacgctgaaaagctccgcgccctctcgcgcaatcaatggcgacgcgacgcgaactctaccggccggctccgtccgccccagtcggggtccccacgcccccagggggagggtgcctctctcgctcactcacccgtcgccctgcgtgccgaattaatggcggcgaccgctgcgtgcaactgatccgacccgacccgaccagaccccccgcgccgacgaccgcctagctctgcactcaccgggaatcagagaccgaggcgccgcgagtagcagaggcaaccacccgttctttggagtcggagcgtcccggcccggtcgggatccattttctgcacgtcgtcaccactcaccacgcgcattggaaccgccggaagccgcgcgtgtgaaaaagctgctgcttcatggtcatggtcatggcggtcacacagcagcttaatttgttacgctaagtcgctaacagttgagacactggcacaagcagcatggccggcctccggctctcatgagactacttgcctcctgtgccagtgccagccagtatagaaattgagacgacgacgtcgacggcaacaacagccgtcaccaccacgccgcgtctcaatcccgttgggtttcaggcgccataactccagcagtcccgctgcgagtgagggggagccggtggcacggctgggctgcaacgatccgtgtccccccgcgtcctcctccttcctactgtgcggtgccggtgccgctgcccccaattgctcgcgttgcttgcgtcccttggcgaccaagttacatgtataaagccatgcatgaccagagaagaacacacaactgtcctggcctgtccacggtccacacacgccttccttatatcggcgctcacggttctataaaaaaaacacagtacgagcagagcaaggcggccgtgagctgagctgagggaaggacgacgtacggctcagttgctagcccggccgccggagctctccgagatctgggccgccagcaacac

SEQ ID NO: 56 - DNA, 3000 bp, Arabidopsis thaliana
  source 1..3000: mol_type = unassigned DNA
attttaagaaattaaatctttttttttggtatctgtgtgttactttttataaatgtattttgaaaagtattatttcaatttatagataaatataattatgactctcaagtggatttttttttcacggtcaattggagtttggctgtgaatcttgtgaataatatcaactaattaagagtcggccgatactccgtatctttgatcactttcacccatatcttgaaatttaccaaatgttttctttcattggggtttctataccttttttttttggttctttctgtaatttgggttttaaagaaaaaacctataattacaaaaaaggttaaaagttaaaactaagcacgttcaaatatgttctttcgagatcccaccttcctgtctatcttataagaagtcgaacacgtgtgctcgttgtgtgaattagagtggttatttcaacatatataattaaactatgtatgtatcataaatacactgaatatgttggagttgggtcttgtggtaggctaacttgttcgcttcactttggtttagtttagccttgtaatcggtggtttcatatactgaaatttttaattttctaatataatccagatgacaaaaaaaaatcataaatacactgcaatggccatttttaaaaaaactttaaacgaaatatatatacatcaccaagtatcaagtaagtaatttggttgttttgatttttcaaaaaaacatttaggtgattcttttaacaaccaatcatatatgtagcaaagattaattatgtcaatcttttaacgtcacttatatagtttagctgtagtattattgtaagccaattgtacggacttcgtaaccgtttcgacaaagatacaaactaatcaatgtttaagatggcataatattccgacttcccctgccactcggtagtactgctgcgccatcctacaagaagcactcgtaaatgagtggttagacggccaaaaattagcaggattcaatccttgattaagagatggttcagataagccctctaggcctctactcgtcacaattcatatattaattgatcacactgcatgaaatgataagatcaagtcaattacctcaaaattaattgaaagataaaatgataaagcaacaagtaatgatcatatatggatgtaacaaccttcttcatccatacgaatatgataattcttttgtcgatcatttgccacatctatttaactaagtattttgtacattaagatcattttgcgagtattcccgcgttcccaacaaaaacgaattgaaaaactacatagggtgaattttgctctcgtggcattaaagagagaggctgacattatagattatgatatatttattatttttcttagtagatttcttgaccagcctttagatatgcttgctctgtcatggcataaagccttaaaccctaaagccctttacatttgtacagtaccaacaattgtacccaatgttaaatgaatgcggattaatttgtgatatgagaccatcaaaataaaatacttataagatagtagatatatagaaccgtaacaaaaagatgagaagaaaaagacaaattgaatagaaactggaccaaaagataaaagagtatatgaagaagcaagccaccaagaagtgtaaccatcgttgcttcaactgtaaaccgcacattaaatgtgtgtgagagaaagagagatagactccagctgtgagagctacgtccattgcatcaattgggttatatgtcgttaacaattttttaaaaatacataaataaatcaataaaatatttagaaaaaatcaatattataatgatattttgaagaagttaggtccataatggaaatatagagacttagtgtctatttatcaagaaatagtgtctatttatcaagaaataatgtctatttggtccacaattatcatattttttgtggccactcaaactacgaaaataatgaatattgttaatttttgtcttatttaagtctataactaacttactaattcggttgaaattgctaatatgcattttccttggtccactattacagtgctactgctgtcttattcttgaacacaaaataaaaaagatttcaaacacaaaatatgcatttttttgttccaccattacaaacctttatttggagaagtatacagttggatattaaatattttaattaaaaaattgaaaatattgaagttctttttctccagtattttggctggagcaaaactaaataaattccaaattaaaagctcgaacggaaaacatttactatgcaccaaaataaatgttgatatgaaatttgcatcagcatatacagtatgtatgtagtacaattgaacagagtcaaaattaattgtcactgaaacagtcagattttatttctgttaaaaaatattttcagacaaaaaatgattttttaacgtttttttatataattttattaaacctcaaaacattcctcagcagattgttttataatgttattattattttttcttaaataattttatttgaatttcgttatagagagataaataaaagatttttggggtctagttggctctcatagtttgaatgcttatataaggaaacagagctcgaggctctcaataatgccacataaaacacaacaccaaagcctttataactctttctggggtttttaattctctcaacgaacaaaaaaaaaaactcaactaatattctccatcctctttcttcagatttaagagaaaccttatcgttatattctctcttctcttttctttttgactcccacaagaagaaagcaaatttctttttctcaggattgcttgaaaactgtagaaatctttaaggtttttttacaccaataagagtcagagagagagagagagagagaaagagagatctattcataaaaaagacaggtaatctcaactccgaggagataactgatataacaatttgagagaataagaagaagaagaagaagaagaccaagctaaaga

SEQ ID NO: 57 - DNA, 2620 bp, Arabidopsis thaliana
  source 1..2620: mol_type = unassigned DNA
attttaagaaattaaatctttttttttggtatctgtgtgttactttttataaatgtattttgaaaagtattatttcaatttatagataaatataattatgactctcaagtggatttttttttcacggtcaattggagtttggctgtgaatcttgtgaataatatcaactaattaagagtcggccgatactccgtatctttgatcactttcacccatatcttgaaatttaccaaatgttttctttcattggggtttctataccttttttttttggttctttctgtaatttgggttttaaagaaaaaacctataattacaaaaaaggttaaaagttaaaactaagcacgttcaaatatgttctttcgagatcccaccttcctgtctatcttataagaagtcgaacacgtgtgctcgttgtgtgaattagagtggttatttcaacatatataattaaactatgtatgtatcataaatacactgaatatgttggagttgggtcttgtggtaggctaacttgttcgcttcactttggtttagtttagccttgtaatcggtggtttcatatactgaaatttttaattttctaatataatccagatgacaaaaaaaaatcataaatacactgcaatggccatttttaaaaaaactttaaacgaaatatatatacatcaccaagtatcaagtaagtaatttggttgttttgatttttcaaaaaaacatttaggtgattcttttaacaaccaatcatatatgtagcaaagattaattatgtcaatcttttaacgtcacttatatagtttagctgtagtattattgtaagccaattgtacggacttcgtaaccgtttcgacaaagatacaaactaatcaatgtttaagatggcataatattccgacttcccctgccactcggtagtactgctgcgccatcctacaagaagcactcgtaaatgagtggttagacggccaaaaattagcaggattcaatccttgattaagagatggttcagataagccctctaggcctctactcgtcacaattcatatattaattgatcacactgcatgaaatgataagatcaagtcaattacctcaaaattaattgaaagataaaatgataaagcaacaagtaatgatcatatatggatgtaacaaccttcttcatccatacgaatatgataattcttttgtcgatcatttgccacatctatttaactaagtattttgtacattaagatcattttgcgagtattcccgcgttcccaacaaaaacgaattgaaaaactacatagggtgaattttgctctcgtggcattaaagagagaggctgacattatagattatgatatatttattatttttcttagtagatttcttgaccagcctttagatatgcttgctctgtcatggcataaagccttaaaccctaaagccctttacatttgtacagtaccaacaattgtacccaatgttaaatgaatgcggattaatttgtgatatgagaccatcaaaataaaatacttataagatagtagatatatagaaccgtaacaaaaagatgagaagaaaaagacaaattgaatagaaactggaccaaaagataaaagagtatatgaagaagcaagccaccaagaagtgtaaccatcgttgcttcaactgtaaaccgcacattaaatgtgtgtgagagaaagagagatagactccagctgtgagagctacgtccattgcatcaattgggttatatgtcgttaacaattttttaaaaatacataaataaatcaataaaatatttagaaaaaatcaatattataatgatattttgaagaagttaggtccataatggaaatatagagacttagtgtctatttatcaagaaatagtgtctatttatcaagaaataatgtctatttggtccacaattatcatattttttgtggccactcaaactacgaaaataatgaatattgttaatttttgtcttatttaagtctataactaacttactaattcggttgaaattgctaatatgcattttccttggtccactattacagtgctactgctgtcttattcttgaacacaaaataaaaaagatttcaaacacaaaatatgcatttttttgttccaccattacaaacctttatttggagaagtatacagttggatattaaatattttaattaaaaaattgaaaatattgaagttctttttctccagtattttggctggagcaaaactaaataaattccaaattaaaagctcgaacggaaaacatttactatgcaccaaaataaatgttgatatgaaatttgcatcagcatatacagtatgtatgtagtacaattgaacagagtcaaaattaattgtcactgaaacagtcagattttatttctgttaaaaaatattttcagacaaaaaatgattttttaacgtttttttatataattttattaaacctcaaaacattcctcagcagattgttttataatgttattattattttttcttaaataattttatttgaatttcgttatagagagataaataaaagatttttggggtctagttggctctcatagtttgaatgcttatataaggaaacagagctcgaggctctcaa

SEQ ID NO: 58 - DNA, 2792 bp, Glycine max
  source 1..2792: mol_type = unassigned DNA
ttaaaaaaaatctcaaaagaataaattttcgactaccagtaattggattttaaataggaagagattaaaaaaccacctcttaatcttatattccatcttccattccataagattgtgggtgtcattaaaacttattatcaatacaaaatgaaaaataaagagtcacggtttgttgaggagaagaatgcacttagttccaaatcccaatacatgtattaagtagtttcgttaacttttttttattaaattttaattatgttcaattaattatcaatttctataattaatttattattttaccccgaatttgagggggaaaaagttaaacttataagatactttccatgttttttaaaaattgcattcaatatttttcttttttttttcaccctaaaaaaatattttaattagttaactcacattacactcagatccccttaacagaaggtccatgttgatcacattatttttaataaaaaattatgtctaaaataccctcaaataaattacacttgcacttccatgtgtttttttaaaattacatctaatattcctccttttttgtacactataaaaaatctcttaattatttagctcccattacattcactaagacttcttccctctcctaaacacagtttaataatttaatagaaagtagacacaatttgatcatatgacttttaatgaaaatttatatctaaaatattcttatcttcttcctcttaacttcataaaaaacataacattattttgaacctgaaaatattttaatacttttttttctctaattgaacctgaactcaccttgttggtacgtatgtgttaatatctttccttttttttttttacttcaattttttttgtgtgttgagttgtttggttgcaacatttttgttggacatgttcccaacaatgccaattgattgaatatgatcatttgcttcaaattttaatgttttgttcatgcatttgtgttttaactcctttctttgaaatatttatttttgatgactagttgcttgatataatgtctcaatcaagagtttatatcttcttcgagtaatagcaacaacgaagtaaaaataaaatattaaaggaaaattgttattgtcttaagaaaaattcattaacagagtcaattgttaatttgttattgagtatttaacaaagatgttaggacaatttcatctgctcatatattccaattgatgttaattaacgacgttaacggaaagagataaaaataatgtaaaaaaaggaaggtatatcagatgcaatttgagaaaaacacaagaaatacgattataacaaaaatgttaaaacaattttatctgttcacatatttcaattaacgtaacaacgttaataaaaaagggataaaagtaatataaaaaagagaagtatcaagtgtaatttgaaaaataaaaaaacacaagaaatacgagtagtgtaattttttttagattaaattaaataataaagtctttgttaaattaaacataaggttactttataatgctctcataatgaaaaccggatttagaggtaactccaaacctaccttatctaacagctgagaggtactgtttcacctgccaaccatataaggcatttactactactctccagatctcttactgctggattacaacacgctacagcaacacgacgcgcggggtgtgtgttttcgtttacgtagattttaattttttaaggctctaattataattaattacagcgtaattaatatggagtactataaagtataataattataataagccatgtatataaaaaggagaagtgtatctgttaatgtgtactaatatcttacacaaaagtatctgataggagtgctcgtgaaatgaaataaaatgatgttattaccagaataacaaatatagaatttagctaacatatatagttaggttaaaatgtttttatataaatatttaatagaaaattacattctccttacattatagttagcattaacgattaagatgatataataaaatgatcaaatcttattaaatatctgtctaaaaataacttaaactaatataatcggtatataaacttaactcttaaatacaacagtgattaaaataaaatcaactttatcaattattatatttaaaaaattaaatagaaataattttatgaaaaaaattactataaaatgcattgataatattgaatactaataatttttaatagtttgtttttagaccaccaaaccagaatcaatcaagggagggttatttcagcttaactaagtttttatatattattttatttatttcataagattaaaatctcaagtgagatacatgaatcaaatagtagtacttttttttagaatatattaattgataatttaatgtcccagttagcagaagacaggtgggagactatcttactttgtaggccacaaggatcaatgcatgatccgcagcgcttataaatacgtgatgggacgaaagaatatatttttaagttgtggctcaaaagcaattactactaagaaaggataaaggaaggaaggaacacttttctgatattctttttggtattgggttgctgacctttgctagtgttatagattttttgggttctcttgtgttttaataaatacaggaaaaaaaaagtatataggtgcctagaagaaaagacaatatagggtgtggagcaattacgtttgatcacaagggaaaaggtgcaacggtttgcaagatagcatagaagattttgaagaatcttaattgcaacatagtagtgcagttgca

SEQ ID NO: 59 - DNA, 2500 bp, Glycine max
  source 1..2500: mol_type = unassigned DNA
ttaaaaaaaatctcaaaagaataaattttcgactaccagtaattggattttaaataggaagagattaaaaaaccacctcttaatcttatattccatcttccattccataagattgtgggtgtcattaaaacttattatcaatacaaaatgaaaaataaagagtcacggtttgttgaggagaagaatgcacttagttccaaatcccaatacatgtattaagtagtttcgttaacttttttttattaaattttaattatgttcaattaattatcaatttctataattaatttattattttaccccgaatttgagggggaaaaagttaaacttataagatactttccatgttttttaaaaattgcattcaatatttttcttttttttttcaccctaaaaaaatattttaattagttaactcacattacactcagatccccttaacagaaggtccatgttgatcacattatttttaataaaaaattatgtctaaaataccctcaaataaattacacttgcacttccatgtgtttttttaaaattacatctaatattcctccttttttgtacactataaaaaatctcttaattatttagctcccattacattcactaagacttcttccctctcctaaacacagtttaataatttaatagaaagtagacacaatttgatcatatgacttttaatgaaaatttatatctaaaatattcttatcttcttcctcttaacttcataaaaaacataacattattttgaacctgaaaatattttaatacttttttttctctaattgaacctgaactcaccttgttggtacgtatgtgttaatatctttccttttttttttttacttcaattttttttgtgtgttgagttgtttggttgcaacatttttgttggacatgttcccaacaatgccaattgattgaatatgatcatttgcttcaaattttaatgttttgttcatgcatttgtgttttaactcctttctttgaaatatttatttttgatgactagttgcttgatataatgtctcaatcaagagtttatatcttcttcgagtaatagcaacaacgaagtaaaaataaaatattaaaggaaaattgttattgtcttaagaaaaattcattaacagagtcaattgttaatttgttattgagtatttaacaaagatgttaggacaatttcatctgctcatatattccaattgatgttaattaacgacgttaacggaaagagataaaaataatgtaaaaaaaggaaggtatatcagatgcaatttgagaaaaacacaagaaatacgattataacaaaaatgttaaaacaattttatctgttcacatatttcaattaacgtaacaacgttaataaaaaagggataaaagtaatataaaaaagagaagtatcaagtgtaatttgaaaaataaaaaaacacaagaaatacgagtagtgtaattttttttagattaaattaaataataaagtctttgttaaattaaacataaggttactttataatgctctcataatgaaaaccggatttagaggtaactccaaacctaccttatctaacagctgagaggtactgtttcacctgccaaccatataaggcatttactactactctccagatctcttactgctggattacaacacgctacagcaacacgacgcgcggggtgtgtgttttcgtttacgtagattttaattttttaaggctctaattataattaattacagcgtaattaatatggagtactataaagtataataattataataagccatgtatataaaaaggagaagtgtatctgttaatgtgtactaatatcttacacaaaagtatctgataggagtgctcgtgaaatgaaataaaatgatgttattaccagaataacaaatatagaatttagctaacatatatagttaggttaaaatgtttttatataaatatttaatagaaaattacattctccttacattatagttagcattaacgattaagatgatataataaaatgatcaaatcttattaaatatctgtctaaaaataacttaaactaatataatcggtatataaacttaactcttaaatacaacagtgattaaaataaaatcaactttatcaattattatatttaaaaaattaaatagaaataattttatgaaaaaaattactataaaatgcattgataatattgaatactaataatttttaatagtttgtttttagaccaccaaaccagaatcaatcaagggagggttatttcagcttaactaagtttttatatattattttatttatttcataagattaaaatctcaagtgagatacatgaatcaaatagtagtacttttttttagaatatattaattgataatttaatgtcccagttagcagaagacaggtgggagactatcttactttgtaggccacaaggatcaatgcatgatccgcagcgcttataaatacgtgatgggacgaaagaatatattttt

SEQ ID NO: 60 - DNA, 2691 bp, Oryza sativa
  source 1..2691: mol_type = unassigned DNA
tgccggttcggcggaagaaacaccgaccaaattttattaagattgaaagaagttacatgcatccgacattagaccgtcgagttaaggcgagaagacctaagaagcaaaacaaaagaaaaactgagagaagaatgtaaagggcaagtgcacttagggctactcctcactaaaccttcttttgtggattgatgcatcaaaaaactatatgtactaggttacatcgtgttttttttttcgttttcgtctcattctctgcttcggcctgccgtctgcttataccgttaattcgatgatgactccagacttcattcatgaatatatttctactatagatatacaaccctcgctcctctatgtttatcttcatcttcatcttcaggagattcaaacaccacctcttaaagatgaagatgaagatgaagataaaaattaagtgtttcacgtaaaacgatgtattaataacatgtgattaatagagttttaattgttataaacttgaaaaatgaattagtatgatattttagagcaactttcatatataaagttttcgcacgagacgtaccgtttagcagtttgaaaagcatgtcacgagtatccaaaatttaatcttgtgcttgcagaagaaacgaagagggcctaacccatataacctgcgtcattaatctatagcttagcaaagtttacttttttgcctgcctcctggcacaggaacgccgacgaagaaaaacctacaggctttctcaactatgattccttcctcaacctgtgaactctggcgacaggaggacgacaggggtgtatgtggagcagataatgcacagtaataatccaatccttaggacttacaaactgctggaatgaactgaccaagtacgtttagaacgtaggaattttgacttatacatgcatagtgtgatttgtacgtgaaatacattaattaattttctgaatttgtttccaatttctcgtcgtcaggcaatgccgcaatgccttgtcttaaagattgcaaattgaatgcgccatctccatcgatctctctatctccattgatggctgcccaaaaaataaaaaataaaaagagccgacaatgtttaaggagagaagcatacgcgcacgtttcgtgatgaaacatacatgcaagactaatttcgaattatatatcacatattcgctctctgaatgagcgtatcgggtatttggaatttcgtttgatatgtaaaagttgaattttaggttacttttttgtggaataatatatcataaattaatattttttataactatttatgtgacatgtaaatgacgagctgatatcagtttaggataatttcctcgctaggtgattgaacgaaccctgcacgcggcagacgtcgtggctactactatctagctagctagcgttggttacgcgtggctactatccagccagaattggttacgccgtcgcccatcgatccgccacaccacgccaaacgcgaacttaattgctactatccgatagtatgtacgcgtactacacaaaagtggggaaaagaaggttgtcctgactccatgagaagacgatccaaaacacggggccggacaaccaaacaagctagctagcggccggcggcgagccaccgtcgtcgttgctgaagacgtcgactaatttggcctcccggccggcgccatcgatcatctcaaaattaatactccctctgtataagggattttgagtttttgtttgcactgtttgatcactcgttttattaaaaaaatttgtgacaatataaaaaacgagaagttgtgcttaaaatacttcggataataaagtaagtaaaaaataaataataattctaaaaaaaatttaataaaataagtgtgcaaacaatacaagcaaaaactcaaaatcacttataatcatgggacggagggagtatatagtatccaaaaatcatctcaaaattaaaaccgaatcgaaactcgccgggccgcggcccgcccggccgtcctggcccaattaattccggcgaccgctgcatgcaacgctccgtacgtgatcgcccagcggctcgcgcgcgcaccacgcgtccacgcgtctctctcctttatacatggacaatggattaatttacttgtagaaaaaaaaacacgaggctagcttagcttgtgcccggcccagccgcgtgcgtgatttccccaagttcacaacctgtacgtgtgtgtggtacgtagcggtcgcaatcccgtttcaaatctcgatcgtgtgtggtgccattaactccgtctggttggggaagccggtggcggatagcccgactgacaggtgctgtggcctggcggccggccggccaatcgatggatggacggatggatcccatcgatgatccttcgttgattcgcgtcaacctctcgctgcccgaatcggactctcaccttccccgccctccaccgctgtgaccgcgcgctgtctgtcccttggctaataccagtcgcagtgcaactgtgcaagtgtttcacgtatataaaagcatcccgagacgcagcgcgcatgaccagccgcgttgggtgcaaaaccacaaccgccaacatcttctaactcccctcacggctctccctctccccgcacgcacaacaccggtgaacccctacgtactactgagctgagctgagaggacgaagaagaagatcaagctcgaggggcttgcgatc

SEQ ID NO: 61 - DNA, 2500 bp, Oryza sativa
  source 1..2500: mol_type = unassigned DNA
tgccggttcggcggaagaaacaccgaccaaattttattaagattgaaagaagttacatgcatccgacattagaccgtcgagttaaggcgagaagacctaagaagcaaaacaaaagaaaaactgagagaagaatgtaaagggcaagtgcacttagggctactcctcactaaaccttcttttgtggattgatgcatcaaaaaactatatgtactaggttacatcgtgttttttttttcgttttcgtctcattctctgcttcggcctgccgtctgcttataccgttaattcgatgatgactccagacttcattcatgaatatatttctactatagatatacaaccctcgctcctctatgtttatcttcatcttcatcttcaggagattcaaacaccacctcttaaagatgaagatgaagatgaagataaaaattaagtgtttcacgtaaaacgatgtattaataacatgtgattaatagagttttaattgttataaacttgaaaaatgaattagtatgatattttagagcaactttcatatataaagttttcgcacgagacgtaccgtttagcagtttgaaaagcatgtcacgagtatccaaaatttaatcttgtgcttgcagaagaaacgaagagggcctaacccatataacctgcgtcattaatctatagcttagcaaagtttacttttttgcctgcctcctggcacaggaacgccgacgaagaaaaacctacaggctttctcaactatgattccttcctcaacctgtgaactctggcgacaggaggacgacaggggtgtatgtggagcagataatgcacagtaataatccaatccttaggacttacaaactgctggaatgaactgaccaagtacgtttagaacgtaggaattttgacttatacatgcatagtgtgatttgtacgtgaaatacattaattaattttctgaatttgtttccaatttctcgtcgtcaggcaatgccgcaatgccttgtcttaaagattgcaaattgaatgcgccatctccatcgatctctctatctccattgatggctgcccaaaaaataaaaaataaaaagagccgacaatgtttaaggagagaagcatacgcgcacgtttcgtgatgaaacatacatgcaagactaatttcgaattatatatcacatattcgctctctgaatgagcgtatcgggtatttggaatttcgtttgatatgtaaaagttgaattttaggttacttttttgtggaataatatatcataaattaatattttttataactatttatgtgacatgtaaatgacgagctgatatcagtttaggataatttcctcgctaggtgattgaacgaaccctgcacgcggcagacgtcgtggctactactatctagctagctagcgttggttacgcgtggctactatccagccagaattggttacgccgtcgcccatcgatccgccacaccacgccaaacgcgaacttaattgctactatccgatagtatgtacgcgtactacacaaaagtggggaaaagaaggttgtcctgactccatgagaagacgatccaaaacacggggccggacaaccaaacaagctagctagcggccggcggcgagccaccgtcgtcgttgctgaagacgtcgactaatttggcctcccggccggcgccatcgatcatctcaaaattaatactccctctgtataagggattttgagtttttgtttgcactgtttgatcactcgttttattaaaaaaatttgtgacaatataaaaaacgagaagttgtgcttaaaatacttcggataataaagtaagtaaaaaataaataataattctaaaaaaaatttaataaaataagtgtgcaaacaatacaagcaaaaactcaaaatcacttataatcatgggacggagggagtatatagtatccaaaaatcatctcaaaattaaaaccgaatcgaaactcgccgggccgcggcccgcccggccgtcctggcccaattaattccggcgaccgctgcatgcaacgctccgtacgtgatcgcccagcggctcgcgcgcgcaccacgcgtccacgcgtctctctcctttatacatggacaatggattaatttacttgtagaaaaaaaaacacgaggctagcttagcttgtgcccggcccagccgcgtgcgtgatttccccaagttcacaacctgtacgtgtgtgtggtacgtagcggtcgcaatcccgtttcaaatctcgatcgtgtgtggtgccattaactccgtctggttggggaagccggtggcggatagcccgactgacaggtgctgtggcctggcggccggccggccaatcgatggatggacggatggatcccatcgatgatccttcgttgattcgcgtcaacctctcgctgcccgaatcggactctcaccttccccgccctccaccgctgtgaccgcgcgctgtctgtcccttggctaataccagtcgcagtgcaactgtgcaagtgtttcacg

SEQ ID NO: 62 - DNA, 2946 bp, Populus trichocarpa
  source 1..2946: mol_type = unassigned DNA
tactgtgaaaaaataacttgtccagtttttatttcatctgcatttttcaataccaacaaaatcatcgtgaaaatatttgatctaaaaaatcattttttaccatctatttcctattagaaattccaacaccatttatttttatgatagaaaattttatttatttatttgataaaaaataatgaaagaaaatgacgaggaacttaataaaaaaatataataaaacaagaaaaaggataagatttttttaaaagaatgacaactaagattggataaaaaaataaaataaaatactgagggacaaaattgaaagaaaaaacaaattaagaaaaggataaaaaagagcaattccaaaaataaggactaaatctggaaaaaaagaaatgaaataaaatatcgagggacaaaattgaaagaaaaacaaaccaagaaaattataaaaaaaaacaacaatcaagagaatgagtaccatgtttgatataataacaaaacaaaatcaatgaaaatggatgaaaatgaagaaaaaatccaaaacaaagaaagagcaattaaaagaaagaggatcataattgaatttttttcaccattattttttttatcaaaataatataaattttactttttagttgaataaaaaatcaagttattagttaggggaaaatcatgttaacacccattgatttttatttttgccattatttttttttatcaaaataatgtcattttacttcctgcaaaataaaaaactcgattgaccctggtaaccctgatcactcgacccaacccatgactcgggagatgatgggggtcgactcctaagccgggttttaaaagcatgataaaaaaataagcactaaatatgaaatgaaaatccaataaaattaaacaatgactgatgaaattgcgaaaaaaaattaatcaataagagaactaaaaataacaggaattacaatcataagaataatgaacgaattcaacaaaaaaaagaattaaaatcaaatgataatggattaaattgaaaaataaattccaattagaaaaaaaaagattaaaagcaaaataaataggaataaaaaaatgaggatcaaatttgacaaaaaacataaaaaaatcaaatgttaagggatgaaattaaaaaataaataaatcagattcgatacaattagaaaattgagaaccattttgcaactttacaaggttaacacatcttttgatatagaggagagagaaaagaggggtggagaaaattttttgcttgaactccgctgcgccacgaatgatgacatgtgttggcccaccgtgtggagggcgacatgacacttcggatgccgttgttaaagaccactaacaaccactgggaggagcctcacgcgccactcaaaaggcgcgagcgccttccacttgctggcgagtgctctgcgcgccccaactacttttttttttgaattacagaaagatcataacattcatgaccccacatgataatttaaaaaaaatctaaaaacaccccttgaccttaaacaagaaaaagttaattccaagggttattacagagagcaaaacactcctaatcccatgtgataattgcaaaaataaacctaggtttgagaaaccaaagataccctttacccttagaaaatatttttgaccccaagagctatttggtaattagactatgaaaaaatatgaaaattaagaaatgaccattgaacataaaacctttttttttccttctaaaatcatgggcgtaattatactaagcaacaaaatgtaaaaatactattccactcttatatgtattttatattttgatatctttgaaggacaaattaatcgttttattatgaattgcactgtggacaatccacaataaaatactgataccttttagttatatgttaaacattgaagaaatgttttttcatatttttcacgatttttttatttttatatcttttagttttccaaatttaatagtaaaaattaaattgggtaaaattattagtctaaatatgatgtaaacataaacattaaaatgataaaatatttaaagagatatttatataaaaaaattaatttattgccatccctatcttttatcttctttaaccttccttgctagaaagaataaaaaaaaatagttaaaaaatattcttaaaatcaagacaaaaattaattattatttccatctccaccataaaatatatttcttattggtttatttgatattataatagcggttgtttttttataaatatattaattattttttaaaatttatttttaacattaacacatcaaaataattttaaaaaattaaaaaattaattttaaataaaaaaaccctataatagaacgtaaaaaaaacaaacacgtattttgaattaattaccaatttggcacaaaccgtgagctgaattcttcaactgcccaaccaaagagtcattaatttctaggagcatgaggccaccactccagctgtgtgccaaatgacaagggaggagaggaaatgagacaaaaacatggaagtgtgagctgctaaataaagattgattaagaacttcaactgtatttttggtccttccttcaagctatatatatgtgggtgcctccataaagatatcgcagttacgagtaatagatatacagtgttagtcgagtctttaaaggaaaaaatcaaagagagagagactgaacttgatactctcttcctttcatctctctctccccctcttaccctctaagggttgctccatctggagcttgcgttcatgttttttcgcttcatttgtggtgtagctaaccactttgagccataaccagggaactatctttttacccaacaagataaagctgcttacaggagcaaaattgagacatatactccagtaaaaactcaagaaaaaattgaagaaaaccgttgaagatcaggtgctttactgcaaaaaa

SEQ ID NO: 63 - DNA, 2500 bp, Populus trichocarpa
  source 1..2500: mol_type = unassigned DNA
tactgtgaaaaaataacttgtccagtttttatttcatctgcatttttcaataccaacaaaatcatcgtgaaaatatttgatctaaaaaatcattttttaccatctatttcctattagaaattccaacaccatttatttttatgatagaaaattttatttatttatttgataaaaaataatgaaagaaaatgacgaggaacttaataaaaaaatataataaaacaagaaaaaggataagatttttttaaaagaatgacaactaagattggataaaaaaataaaataaaatactgagggacaaaattgaaagaaaaaacaaattaagaaaaggataaaaaagagcaattccaaaaataaggactaaatctggaaaaaaagaaatgaaataaaatatcgagggacaaaattgaaagaaaaacaaaccaagaaaattataaaaaaaaacaacaatcaagagaatgagtaccatgtttgatataataacaaaacaaaatcaatgaaaatggatgaaaatgaagaaaaaatccaaaacaaagaaagagcaattaaaagaaagaggatcataattgaatttttttcaccattattttttttatcaaaataatataaattttactttttagttgaataaaaaatcaagttattagttaggggaaaatcatgttaacacccattgatttttatttttgccattatttttttttatcaaaataatgtcattttacttcctgcaaaataaaaaactcgattgaccctggtaaccctgatcactcgacccaacccatgactcgggagatgatgggggtcgactcctaagccgggttttaaaagcatgataaaaaaataagcactaaatatgaaatgaaaatccaataaaattaaacaatgactgatgaaattgcgaaaaaaaattaatcaataagagaactaaaaataacaggaattacaatcataagaataatgaacgaattcaacaaaaaaaagaattaaaatcaaatgataatggattaaattgaaaaataaattccaattagaaaaaaaaagattaaaagcaaaataaataggaataaaaaaatgaggatcaaatttgacaaaaaacataaaaaaatcaaatgttaagggatgaaattaaaaaataaataaatcagattcgatacaattagaaaattgagaaccattttgcaactttacaaggttaacacatcttttgatatagaggagagagaaaagaggggtggagaaaattttttgcttgaactccgctgcgccacgaatgatgacatgtgttggcccaccgtgtggagggcgacatgacacttcggatgccgttgttaaagaccactaacaaccactgggaggagcctcacgcgccactcaaaaggcgcgagcgccttccacttgctggcgagtgctctgcgcgccccaactacttttttttttgaattacagaaagatcataacattcatgaccccacatgataatttaaaaaaaatctaaaaacaccccttgaccttaaacaagaaaaagttaattccaagggttattacagagagcaaaacactcctaatcccatgtgataattgcaaaaataaacctaggtttgagaaaccaaagataccctttacccttagaaaatatttttgaccccaagagctatttggtaattagactatgaaaaaatatgaaaattaagaaatgaccattgaacataaaacctttttttttccttctaaaatcatgggcgtaattatactaagcaacaaaatgtaaaaatactattccactcttatatgtattttatattttgatatctttgaaggacaaattaatcgttttattatgaattgcactgtggacaatccacaataaaatactgataccttttagttatatgttaaacattgaagaaatgttttttcatatttttcacgatttttttatttttatatcttttagttttccaaatttaatagtaaaaattaaattgggtaaaattattagtctaaatatgatgtaaacataaacattaaaatgataaaatatttaaagagatatttatataaaaaaattaatttattgccatccctatcttttatcttctttaaccttccttgctagaaagaataaaaaaaaatagttaaaaaatattcttaaaatcaagacaaaaattaattattatttccatctccaccataaaatatatttcttattggtttatttgatattataatagcggttgtttttttataaatatattaattattttttaaaatttatttttaacattaacacatcaaaataattttaaaaaattaaaaaattaattttaaataaaaaaaccctataatagaacgtaaaaaaaacaaacacgtattttgaattaattaccaatttggcacaaaccgtgagctgaattcttcaactgcccaaccaaagagtcattaatttctaggagcatgaggccaccactccagctgtgtgccaaatgacaagggagga

SEQ ID NO: 64 - DNA, 2817 bp, Vitus vinifera
  source 1..2817: mol_type = unassigned DNA
tatattatgtaagtttgaaaaaaaggataatatttgataaggtatttaaaaattatttacttcaaaaatgcattcaacaataataatttttaaccatttatctttcatgttcaatttattggagaaaaattattggtaaatcattcaacttggtcccattaataaataggtactaataaataggtgagagaatggtgaaaaaaccaaagagagaataagaaaggtagagtgaccagagttttttcatttaatagtcagaggtattttaggaattttttgaagacaatatctttcatttcaatttctactctttcattgggttttaagtttaattataaattatatgaggaccttatctcaattattcaacccaactgggatagaaacagaattctccctatttagattagggaaaattgatttaaggttttttttttttaaatagagttaacaataaaatacaaactaacaaactttcaagagaaagaaaaaaaaaacacttataatattacaaaaaaaaaaaaaaaaaaacacatcctaatcacatagcaaaactcaatattttttctctctcttcttttgtcctattaacaaccaaacatgattcaattaattgaattaaactattaaactaataaaaagagccgatccaacttggttgttagttgttccgtattgcatttgcttttacggatgaggaaattgaattaaaattgtaattagcataacagacgaagaactgaatatagtcagggagtagaggaaaagtttagattatatttatgacattaaaaatcaacctaatccaacttggttgttagttgttccgtactgcagttgatttttatgcataagaaatattggacggtccaatataatataatattagttgatatatagctttcagttaggttggaaggtggacaattgcaagtgccaagtcaaggttagtggcaagggcggctccatcattcacaatttgcctgccattacctcccttttgcttggagttttcccatcaagcaatacatttattgttgtttatagtgttaaagggattatgcaaatatcatttcatataagctgaaggaaatttcatgaaaaaaaaaatagcatttattatttatactatgaaggcaaccatagaaattaatatcatttcataaagttaaacaaatttaaggcaaaaaggaatttgttgcctatcacattaaagaaaatgatagaattaagggaagaaaatttagtctatgtttagtttttgaaaaatttgaaaaaaaaatggaaagaaagaaaataaaaataaaaaataaattatttttatatgttttcttaaatttcataaacttatttttcttcattgtattaagattaaataattttaaaatatataaatttttaattaattttaattatattttattttcttttatatttttcatgatgaaatcaaacatgaaaaaataattttttttaatatttttttttctttccttattatttttcaagaaccttaaaaatgtaaaagttttaagttttaagttgatttctttttcttttttttagtcttttttatttttaggaaatataaataattttaaaaatctgtaaggatttttttttcatttgataatataatcatatttttataaataatgaacatatactttgagactttgaattaatgtaaatttaaataattatcctcctaaataatatttataaaaattgaatgtagttctcaagaaaagaaagaattaaaataaattgttcaatttttactttttttatttacttaaaatccaactattttccaaaattttgagggagtgagtacatagaatgattcatttttcttctactcataattcattttggagattcaaatgaatgaaaattagatagtatagtctattttcaaattcacaagttgaagaaaaaaaagtgatgatgagtagaaagatgtatcgtcaagttcatcatttaataggcacaccgccacaaatcctcattcatcttgaagaatgaacttagagatgagattttggaagtgtacagtgtgatacgtatgagtggtgtgtattggtacattaagatggataaagatggaaataaaatggagagaaagaaagagagagaggaggaaaaatagaacatgctgctgaatagtatagggtaaccggccccatgacttagcaatacgcaattactgaaaagctccaaccctcctcccaaccatgagccattaatgtcttaagagaatcaggccatcactacagctgtgccatcctccctagcaaatgcccctacgcgttctcaatttggaggacactttttggtcaatttcggtgacgttcatactttgcctagagacaaaatattgatcaatattacaagctaaccgatagagactgattaagagctttaactgtatttggatgcccacttagtttttggagctataagtaggtgcattggagttgggaaaaataaaggccagagtttgggagacttgcaaccaagtttcacaaatacaggggcttaatcaagttgtttcattatccaattattttattataaggcaattccaacctcttaacctctcgatctctttccttctttctgctgcttctatctgggaattgtttccttccctttcctctctttctttttcttgtatttggcttcttctactattttgggctacaatatctcggatctttctgttcccgaactgaaacttttcctcatcaaaagcctgtacagatagagaagagtttgcacatatattaagaaaggaataattttgtcggaaaa

SEQ ID NO: 65 - DNA, 2500 bp, Vitus vinifera
  source 1..2500: mol_type = unassigned DNA
tatattatgtaagtttgaaaaaaaggataatatttgataaggtatttaaaaattatttacttcaaaaatgcattcaacaataataatttttaaccatttatctttcatgttcaatttattggagaaaaattattggtaaatcattcaacttggtcccattaataaataggtactaataaataggtgagagaatggtgaaaaaaccaaagagagaataagaaaggtagagtgaccagagttttttcatttaatagtcagaggtattttaggaattttttgaagacaatatctttcatttcaatttctactctttcattgggttttaagtttaattataaattatatgaggaccttatctcaattattcaacccaactgggatagaaacagaattctccctatttagattagggaaaattgatttaaggttttttttttttaaatagagttaacaataaaatacaaactaacaaactttcaagagaaagaaaaaaaaaacacttataatattacaaaaaaaaaaaaaaaaaaacacatcctaatcacatagcaaaactcaatattttttctctctcttcttttgtcctattaacaaccaaacatgattcaattaattgaattaaactattaaactaataaaaagagccgatccaacttggttgttagttgttccgtattgcatttgcttttacggatgaggaaattgaattaaaattgtaattagcataacagacgaagaactgaatatagtcagggagtagaggaaaagtttagattatatttatgacattaaaaatcaacctaatccaacttggttgttagttgttccgtactgcagttgatttttatgcataagaaatattggacggtccaatataatataatattagttgatatatagctttcagttaggttggaaggtggacaattgcaagtgccaagtcaaggttagtggcaagggcggctccatcattcacaatttgcctgccattacctcccttttgcttggagttttcccatcaagcaatacatttattgttgtttatagtgttaaagggattatgcaaatatcatttcatataagctgaaggaaatttcatgaaaaaaaaaatagcatttattatttatactatgaaggcaaccatagaaattaatatcatttcataaagttaaacaaatttaaggcaaaaaggaatttgttgcctatcacattaaagaaaatgatagaattaagggaagaaaatttagtctatgtttagtttttgaaaaatttgaaaaaaaaatggaaagaaagaaaataaaaataaaaaataaattatttttatatgttttcttaaatttcataaacttatttttcttcattgtattaagattaaataattttaaaatatataaatttttaattaattttaattatattttattttcttttatatttttcatgatgaaatcaaacatgaaaaaataattttttttaatatttttttttctttccttattatttttcaagaaccttaaaaatgtaaaagttttaagttttaagttgatttctttttcttttttttagtcttttttatttttaggaaatataaataattttaaaaatctgtaaggatttttttttcatttgataatataatcatatttttataaataatgaacatatactttgagactttgaattaatgtaaatttaaataattatcctcctaaataatatttataaaaattgaatgtagttctcaagaaaagaaagaattaaaataaattgttcaatttttactttttttatttacttaaaatccaactattttccaaaattttgagggagtgagtacatagaatgattcatttttcttctactcataattcattttggagattcaaatgaatgaaaattagatagtatagtctattttcaaattcacaagttgaagaaaaaaaagtgatgatgagtagaaagatgtatcgtcaagttcatcatttaataggcacaccgccacaaatcctcattcatcttgaagaatgaacttagagatgagattttggaagtgtacagtgtgatacgtatgagtggtgtgtattggtacattaagatggataaagatggaaataaaatggagagaaagaaagagagagaggaggaaaaatagaacatgctgctgaatagtatagggtaaccggccccatgacttagcaatacgcaattactgaaaagctccaaccctcctcccaaccatgagccattaatgtcttaagagaatcaggccatcactacagctgtgccatcctccctagcaaatgcccctacgcgttctcaatttggaggacactttttggtcaatttcggtgacgttcatactttgcctagagacaaaatattgatcaatattacaagctaaccgatagagactgattaagagctttaactgtatttggatgcccacttagtttttggagctataagtaggtgcattggagttgggaaaaataaaggccag

SEQ ID NO: 66 - DNA, 456 bp, Zea mays; identical to SEQ ID NO: 40
  source 1..456: mol_type = unassigned DNA

SEQ ID NO: 67 - DNA, 2980 bp, Setaria italica
  source 1..2980: mol_type = unassigned DNA
gaacgacggaaactgctagcgtaactatagaattctggaaaggataggcacgtcgtttttcagtccactccgtacagcgacagaaacagacgtctctcaaaaaatcagtacaggtgtaatgacatttacagccacgaaggatcgttttctttgctatacatactcaggtttttctctacttatactaatctttcgctaatttatctctgaccagtaaaaggctgtgtttcctattgtgcgcagaaagatcagaccacacgccaagagccgtgccgaggtatatatggaaacagtacactactatctgcagcagtgcagcatcgatttcttcgccccttctcctgaaaagtcgagatataaaaagatggagaaaacctcggtcaaatttggattagttgcatgcatgcatgcatttcatcgcgaggattacctccgttttaaaatgcttgacatgattttcaaaaccacatttaacaatttgtcttattaaaaatcaatatattatgtaaaaatataaattatatttaaaatatatttaataataaaacaagtcacaattaaataaactatactccttacataggtttataggtttctgaaatctgaacaagacgattatcatgtgcagagtccaaacgtcaacggtgtaaaacaaacacttgaaacccgaagtaaatataccttcatccaacaacattgacaatactactacttcctccgtttcaaattgtaggtcattttagcttttctaatattattatgcatccagacatacactatatctagtgcatagaacaactatacgcctagaaaagtcaaaacgacctataaaggtataaaggagtggtagttgcttatccaagatgattagcgaattgcatcttagaagtggataagatgcttaaatttgcaccgtactttggtacacatggtagctttcctcatgggaattaacttcaaaccgctcttatgacccttcaagtacttgtgtttaagcacacaccttgcattttagatgccataatatacatttttttgtcctttttaaggcattcattttttttagttttgacttgttttgttattgtattactatcacaagccgatgatgcatcatgcatgtaattacctgacctatttcactcaggctatttctagtggagagtttcatctcacagtttccaagaatgacatgtcatcaaaagaggtttgatttctagtggagagtttcacctcacagtttccaagaatgacatgccatcaaaagaggtttgagttgatgaatgaaacaataccccccaatgcagagttttatttcacacccataccatttaattgtgaggcctgtgattggatatgctaagatgaaatgaaactctatagccccaaatgcaagtttcaacaggtttcgtagtcttgaaaacagtgcatacacagtttcatcttgagagcaagtttaataacgcagctagcaagcgggctgcaaggtttctctcagccttttcctagcccactcgtacaatggttaactcttcaccattaatacatgatccacaagtcattctcacaaagtttcttggttcctgtgcccaagtcggctataagcttatagcccgcttctcctctctcacctcttctctctcctccacgtcagcattcagccagcttacagcctcttattatacttgctctgatgaaactcttttcctctctcacttcataattaccttgccatgttatcaatgtgtcatcgtatttaacgtatatgaaatttctatgaaacttgcactggactagcttttttgtttttgcgaaacaccgtcgacatcgagagcagtgcttagttggctgctgttcacacaggtcatcaaagaaatgaagcactgctttaaacatttgctcttatacttggctacaatggaagaggcacctaatttggacgctccatatgctatacgatgaatgtaaaagtagcagtggagaaccgagaacctcttccttctccatcactcaataactacggcggttatctagtcttaaaaatttgtcaacagtgcattattcatgaacaggacgtacgtccactgccaaacaatctcgtagccggaaattaaataaccaagaaaaaaatgaaaaatacaccggcaaattaaattatgtaagcctatctttacatggaaaatgcatgattgggcttgctgccttcgtcaattttctcctttatggctgtacacatatatagcttgaaataaatatgtatgacatgcagatatatgaacgtttattttcacattttccacgaaaaaaagtatataatgacgtccaataaatccaaaatacatgacatatttcgcatatttcgccgtattgtagcacacatattgttgacgaaaataatataaaaatcatgcacccgtctcgctctctctctcctagcaattacgatacgccctctcaataaatgcggattgcaccacctcaacactcgtccgcaataactccttcccctcttcctccacattctcttccacctccgttcccctttcttctcttcctcttcctcctcctcctcccttccccttccatggctgtctagctcctcaggatctctccgtctctccacttcctgctagctacccttctgagcttgcacgcggtaaagaatcatctcgagagctgcaacttgcaggcagacatagagagagatcagagttctatttttgcaaaggcgcacaacatatatagttcttctgctagatctcactgccagtctcacagagcgaaggtttatttgggctagtttgcccctagatctgttgctggctgtgttgttgcttggcaggcaaggtatctctatataggaataggattagcgcctgttctttggctgtagagagagagagttgtcctatgtgtctctgaagaaatggaaacgaatgagacggcaagaaattagggtttgcgaggtggtcagaggaga

SEQ ID NO: 68 - DNA, 2500 bp, Setaria italica
  source 1..2500: mol_type = unassigned DNA
gaacgacggaaactgctagcgtaactatagaattctggaaaggataggcacgtcgtttttcagtccactccgtacagcgacagaaacagacgtctctcaaaaaatcagtacaggtgtaatgacatttacagccacgaaggatcgttttctttgctatacatactcaggtttttctctacttatactaatctttcgctaatttatctctgaccagtaaaaggctgtgtttcctattgtgcgcagaaagatcagaccacacgccaagagccgtgccgaggtatatatggaaacagtacactactatctgcagcagtgcagcatcgatttcttcgccccttctcctgaaaagtcgagatataaaaagatggagaaaacctcggtcaaatttggattagttgcatgcatgcatgcatttcatcgcgaggattacctccgttttaaaatgcttgacatgattttcaaaaccacatttaacaatttgtcttattaaaaatcaatatattatgtaaaaatataaattatatttaaaatatatttaataataaaacaagtcacaattaaataaactatactccttacataggtttataggtttctgaaatctgaacaagacgattatcatgtgcagagtccaaacgtcaacggtgtaaaacaaacacttgaaacccgaagtaaatataccttcatccaacaacattgacaatactactacttcctccgtttcaaattgtaggtcattttagcttttctaatattattatgcatccagacatacactatatctagtgcatagaacaactatacgcctagaaaagtcaaaacgacctataaaggtataaaggagtggtagttgcttatccaagatgattagcgaattgcatcttagaagtggataagatgcttaaatttgcaccgtactttggtacacatggtagctttcctcatgggaattaacttcaaaccgctcttatgacccttcaagtacttgtgtttaagcacacaccttgcattttagatgccataatatacatttttttgtcctttttaaggcattcattttttttagttttgacttgttttgttattgtattactatcacaagccgatgatgcatcatgcatgtaattacctgacctatttcactcaggctatttctagtggagagtttcatctcacagtttccaagaatgacatgtcatcaaaagaggtttgatttctagtggagagtttcacctcacagtttccaagaatgacatgccatcaaaagaggtttgagttgatgaatgaaacaataccccccaatgcagagttttatttcacacccataccatttaattgtgaggcctgtgattggatatgctaagatgaaatgaaactctatagccccaaatgcaagtttcaacaggtttcgtagtcttgaaaacagtgcatacacagtttcatcttgagagcaagtttaataacgcagctagcaagcgggctgcaaggtttctctcagccttttcctagcccactcgtacaatggttaactcttcaccattaatacatgatccacaagtcattctcacaaagtttcttggttcctgtgcccaagtcggctataagcttatagcccgcttctcctctctcacctcttctctctcctccacgtcagcattcagccagcttacagcctcttattatacttgctctgatgaaactcttttcctctctcacttcataattaccttgccatgttatcaatgtgtcatcgtatttaacgtatatgaaatttctatgaaacttgcactggactagcttttttgtttttgcgaaacaccgtcgacatcgagagcagtgcttagttggctgctgttcacacaggtcatcaaagaaatgaagcactgctttaaacatttgctcttatacttggctacaatggaagaggcacctaatttggacgctccatatgctatacgatgaatgtaaaagtagcagtggagaaccgagaacctcttccttctccatcactcaataactacggcggttatctagtcttaaaaatttgtcaacagtgcattattcatgaacaggacgtacgtccactgccaaacaatctcgtagccggaaattaaataaccaagaaaaaaatgaaaaatacaccggcaaattaaattatgtaagcctatctttacatggaaaatgcatgattgggcttgctgccttcgtcaattttctcctttatggctgtacacatatatagcttgaaataaatatgtatgacatgcagatatatgaacgtttattttcacattttccacgaaaaaaagtatataatgacgtccaataaatccaaaatacatgacatatttcgcatatttcgccgtattgtagcacacatattgttgacgaaaataatataaaaatcatgcacccgtctcgctctctctctcctagcaattacgatacgccctctcaataaatgcggattgcaccacctcaacactcgtccgcaataact

SEQ ID NO: 69 - DNA, 3000 bp, Vitus vinifera
  source 1..3000: mol_type = unassigned DNA
tcagactgtcttgagccatcatcatcatagtttaacccatggttgtaaaggatccaatcagagtcacacgctgcacgcgcgcgcacacatttagagggattcctttttgtctagattgtaaaaattataatttttacgaattactatagaattaagacaaaatagtaaaagattcctacctggcactgtaatttttcactttacacgtggtaaattagtctgacatatacagtgcacgctcatttttaacgcatgcatgttagtccaccttcaagcagaggctagatgctatgttcgattcaaaaatcaaaacaaaaaggttgtttcacattatgtccgatttgaaaaaccaagaaagaaaagaaaatcttgtttcatgtagaaggagataaaattttaggcaaagatcaaaatttggtaagaagtaacataattgttggtttgtttatcaaatatggcaagctttacacggtaatatgcaaccaatatatgcataattacatttgtatgtagttaatagcataatagcatgcagctaatgtgtacactcttttgatatgtacatatcacactacaccatggtgcaagaatgttagagcatatatagaaatggggggtttcatgaattacaaatatttggtaagcttgttatctaaaggcaatattaggttgatatttttttcaatttggtgagggaacaaaactgccttattaacaatatccaaatttatgattgagtggaataagaaaaattaagggtgccctgaagacagccattagcccacagattttggtacaataagatacgttatcaagctaagagatttgtgcaagggaggcatgaatatagtaaatgatttattctgcatgcagaccctgctcgtggctcaggcatttaatggaatattgctagggagaaggaggagagatggggctaaaatgcttcatcacagctccacctccacctcctcctcctgataattccctttcttaattccctcacatacccacatgtaataatagatctttgtcacggggattggtgccaaaaacatcatatttggaacattaactattaatccatgttttccatacatgttactcacaaaatcttctgtttatacaataaattattggatgcatgtagcaaaatccttttaaggggtgattcattagggcaaatcgtgctttatggacatggaagttcaactcaattgaggcgtaaacagtgaaaacagtgtcacaaaacaaccatttgtaaaagcttaaaaggtactgtatatgagaagcgattaatgatatacaaacaaggagagaaacaataaaagaagtttgaaaaggagttggagaaaaggtgatgggagaatgagaaaaaaaaaaaaaggaataaaagaaaaagaaagagttgaaaggagtgctgcagttaagatgggtgtaattggcttcaccatacacgctctctcaaagacatctaaacatcaaacgcttatatgcttctgtatttctatatatatttctctctccttagcaattacacctccatccaccataaatgctattgcaccctctcaatacgctctgcaataactcctcgctgccacatcttctccacctgttaccctttcttcttccctttctcaccttctccaaagctctctgcctttcgagtctatctcctctttttcgccgtccctttattctccctctctctctctgcctcttcctctctcagtgttcttctcaaaacctgttactctcatctaaagctgccagaaaaccactctttcagcgcccaaaaagtggttttccggtgacccaatagtctctaaaacagatctgccactttgctcactggacttgaccttcatcttcaaaagggtcgttttgcttttctcccatagcttccgcacctgtaagttattttgaccccataggtcttctccatttttcaccagtctttatttatttttatttttttttgagtggggggtctaaatggggttgcaacaccatcattctcatccttaactgtcttgagacacaagattttttcacctttctttgcatattttattaacttctgagtttttgctctattttccgttatcttttttgcagtagagaaagagcaaaggttgaggttgaggttggacgcaccgagatcttcgtgggcgttatggtttgaaattggtgtttcaaagcccattccatactgtccactctatcttccatttttctccagtaagagctttgtgacctacgaacagaaatacagggtcaagatcttctttcaaagcccaaagccacagttgtagctcctccactgctgcatgtttagggtttgtgggggcagtgacacttcccggccggaataatgcttccggctaatgactggccactgccaattgaaaggaacctaaaggttgctggatttgggttgtcatcaggactaattctaagcgtggtaagccttcgtggcagtccaagttctattgatgtccatttcatggactgtgagtctgtgaagactgttagggttgtctgggtttgggtttttcttttatcattttcttagtcatttcattgtttcctcatctctcttttttctttttctttttctttttctaaatatatatacatattcaagatcaattagattagtagagggtttttgctaggcattaaggtatttcaagaaaaatcattctcgatacaaacgctaaaaagctgttttgcagatgagagagagagtcttctcataaacaggttttcaaaagtgggatagggatccataacctaagaaaattaattcactgcttaatactatgtacagatttccacacatgattaattcttttcttcttaattcaaattcttgagggtttttttttttttttttcattctttacatgggcttcttccttttgaagtggttgactcatttcattctcttggcagattgaagaaccctagctttggaatcataaaggatctgtgaat

SEQ ID NO: 70 - DNA, 3134 bp, Populus trichocarpa
  source 1..3134: mol_type = unassigned DNA
aattaatcttttttttgtttgatttagttcgttaatattaattttttttctatttagttatcacactctcaggatacggatcccaggtttgacgggttaacccagttgattcagaatgtttttctttttaatttggtttgcataatttttgttagagtttttggattcatacatgtgtttggaaaacacccctcaagcctatttttagtggttttattacaaagaaaaatggatgtttggccaaacaaagcctaaaatttttttaaatataaaaaaacatcttttttcttgcatatggctaaaaactcctaaagttatttaagcatttcttttataaaaaaaatttaaaatacttttatatgttttttctaaaaaaaacatattgcataaattttacaataagtttgtaaaatttctaaggattttggcctacatttcagaaatacaaaaaaaaattattttgtttcttttaatatgtgagattatgaacttatatgtaagacttattcctgctattaaataaaaaacaattttttttatattggcactagaacgattaagtttttaacctgataagatgaagaccttcttacagagaaagacttttcttaaaccctagaatgaccaacggttagaaaacacaacattaccttagtttacgttagacaaataaacaatacagtttacctcaggtacgacgtattaggggtgttaatacctttcttttatacaatcagttctcttccccagactcagagaccagttagggtttctagtgatcaaaatattaagtgacaactttcatttcttttttttttctactgataaaagacaagtacccttcttcttcttattttttttttaatgttgtcaatttatttataaataagagacaaaaaaaagaaaaaaaatattgtccatttattaaacaaattgttatctaaatttgtgtgtgtataatcattttcatttattagataggcatttcttacaatgattttaagttcatgtagactttaatttattgtgtgttatatgtgatatatatttcacaactcatgaaaattataatgattttgtaagataacatctcctatttctgaccccagaaaactcctagatatattctcattaattacgtttttatttaaacaataataataataataataataataataataaataaactatatatatagtttatttattattattattattattattatatatataatttgattgtgtgtataatttagccatattttttcttcgttaatcatgttgttcctaactaggcatcaagaccacaaaatcatgaggaaattatgatttcatacacgaatattgatcatctacgtacataaatttttgcactggtgaagcaacaacaatggtggaaatttggaatccaagaagccgtaattcacaccaccatacttctagaggaaatttaaacatgaaataatgatcgctccttttcatctctttctcactctctcgcatttacacctctctcccaccataaatgctagcaaaccctctctatacgctctgcaattactcctctgctgccacatcctcaccacctgttccctttcttcctttctcagcttcttcaaaaccttataatttgtctcctccttttcctcttccgtttctctctctgtgtgtgcccttttttctcccatcatagtttaatcatacagtcatcttaaaacccttttcagaacatagggtctctcttcaaaaaccagccagtaaaccacttgtctagccctaaaaactggttttgtagagacccaaaacctcttccatcacaaatctaatccttgtttccatggaacttcaaaggcttctatattttggtaagttgcacaccttgtctataaaacctttcaattcatttctcttcaccataagattctctcattttcagttttatatcatgtcctaatctttttcctaaacataaaaatggtgttttttattattttttgtgcaggaattgaaaatgtcgagtgggatggattgacctagatcttagtgggcgttatagtcttggtaatggtgtgttgaaatttatttgtcaaagcttcagagaggggtccatttagtgtcaactcttcatgctcatttgtttttttatataattttaatcttttggaacgtaaaactagaaaggacttgagacttttctttgaagttatgacccaaacaccctacagtcaatcctcctctcttactacttttctttgatgttatgaccgacccaaacaccctacagtcaatcctcctctcttactacttgtaataatctttttttttggcttttgctcaaacatcttgagagaatctatttcgcaaaccaaccccacatacagccaacgtaagcagcaaaatcaatcatgtcatatcctcaagagatagaaagagagaaagataaggatgctgcttagggtttgttggtgagagtaagatatgccttctacaatggagtttaaaggagaaaaaggttgtcagatttcaatcatcctctaaggttagtcaatcaggtaaggttcctctcactttggttgaggttcttaaaaagtgtttttattcactaaatatgcttaaacaaagtaattaaaacgtttccaagcaacatccttcttggaatgaacgcataacgcttttttttttttgagtaaaaagagagagagagagagagagaagagagaggaagataaaaggtgttatcttgcttatctggtgattagccatctcttgtaactacagctacgacagtgtggaatacacttcaccttgccctacaaatttcaaacaacatttattatgttgggaatttaacttggttttgctttttttcctccttgtactcttttttataattcatcaatgtttcctatcaataaatctttccatatagatgttaatttcttatctacaaacatctcatatatagcctttaatacttttctttacttgtacacatgatttactcacccctttagcatgtttacatggcattccttaggattattcttctttttttatttgcttatttatgattttttatttgcagattggaaggacagcttagcttaaaatttaagggatttatacaa

SEQ ID NO: 71 - DNA, 3091 bp, Populus trichocarpa
  source 1..3091: mol_type = unassigned DNA
aattaatcttttttttgtttgatttagttcgttaatattaattttttttctatttagttatcacactctcaggatacggatcccaggtttgacgggttaacccagttgattcagaatgtttttctttttaatttggtttgcataatttttgttagagtttttggattcatacatgtgtttggaaaacacccctcaagcctatttttagtggttttattacaaagaaaaatggatgtttggccaaacaaagcctaaaatttttttaaatataaaaaaacatcttttttcttgcatatggctaaaaactcctaaagttatttaagcatttcttttataaaaaaaatttaaaatacttttatatgttttttctaaaaaaaacatattgcataaattttacaataagtttgtaaaatttctaaggattttggcctacatttcagaaatacaaaaaaaaattattttgtttcttttaatatgtgagattatgaacttatatgtaagacttattcctgctattaaataaaaaacaattttttttatattggcactagaacgattaagtttttaacctgataagatgaagaccttcttacagagaaagacttttcttaaaccctagaatgaccaacggttagaaaacacaacattaccttagtttacgttagacaaataaacaatacagtttacctcaggtacgacgtattaggggtgttaatacctttcttttatacaatcagttctcttccccagactcagagaccagttagggtttctagtgatcaaaatattaagtgacaactttcatttcttttttttttctactgataaaagacaagtacccttcttcttcttattttttttttaatgttgtcaatttatttataaataagagacaaaaaaaagaaaaaaaatattgtccatttattaaacaaattgttatctaaatttgtgtgtgtataatcattttcatttattagataggcatttcttacaatgattttaagttcatgtagactttaatttattgtgtgttatatgtgatatatatttcacaactcatgaaaattataatgattttgtaagataacatctcctatttctgaccccagaaaactcctagatatattctcattaattacgtttttatttaaacaataataataataataataataataataataaataaactatatatatagtttatttattattattattattattattatatatataatttgattgtgtgtataatttagccatattttttcttcgttaatcatgttgttcctaactaggcatcaagaccacaaaatcatgaggaaattatgatttcatacacgaatattgatcatctacgtacataaatttttgcactggtgaagcaacaacaatggtggaaatttggaatccaagaagccgtaattcacaccaccatacttctagaggaaatttaaacatgaaataatgatcgctccttttcatctctttctcactctctcgcatttacacctctctcccaccataaatgctagcaaaccctctctatacgctctgcaattactcctctgctgccacatcctcaccacctgttccctttcttcctttctcagcttcttcaaaaccttataatttgtctcctccttttcctcttccgtttctctctctgtgtgtgcccttttttctcccatcatagtttaatcatacagtcatcttaaaacccttttcagaacatagggtctctcttcaaaaaccagccagtaaaccacttgtctagccctaaaaactggttttgtagagacccaaaacctcttccatcacaaatctaatccttgtttccatggaacttcaaaggcttctatattttggtaagttgcacaccttgtctataaaacctttcaattcatttctcttcaccataagattctctcattttcagttttatatcatgtcctaatctttttcctaaacataaaaatggtgttttttattattttttgtgcaggaattgaaaatgtcgagtgggatggattgacctagatcttagtgggcgttatagtcttggtaatggtgtgttgaaatttatttgtcaaagcttcagagaggggtccatttagtgtcaactcttcatgctcatttgtttttttatataattttaatcttttggaacgtaaaactagaaaggacttgagacttttctttgaagttatgacccaaacaccctacagtcaatcctcctctcttactacttttctttgatgttatgaccgacccaaacaccctacagtcaatcctcctctcttactacttgtaataatctttttttttggcttttgctcaaacatcttgagagaatctatttcgcaaaccaaccccacatacagccaacgtaagcagcaaaatcaatcatgtcatatcctcaagagatagaaagagagaaagataaggatgctgcttagggtttgttggtgagagtaagatatgccttctacaatggagtttaaaggagaaaaaggttgtcagatttcaatcatcctctaaggttagtcaatcaggtaaggttcctctcactttggttgaggttcttaaaaagtgtttttattcactaaatatgcttaaacaaagtaattaaaacgtttccaagcaacatccttcttggaatgaacgcataacgcttttttttttttgagtaaaaagagagagagagagagagagaagagagaggaagataaaaggtgttatcttgcttatctggtgattagccatctcttgtaactacagctacgacagtgtggaatacacttcaccttgccctacaaatttcaaacaacatttattatgttgggaatttaacttggttttgctttttttcctccttgtactcttttttataattcatcaatgtttcctatcaataaatctttccatatagatgttaatttcttatctacaaacatctcatatatagcctttaatacttttctttacttgtacacatgatttactcacccctttagcatgtttacatggcattccttaggattattcttctttttttatttgcttatttatgattttttatttgcag

SEQ ID NO: 72 - DNA, 3940 bp, Medicago trunculata
  source 1..3940: mol_type = unassigned DNA
tgattactctagagagtaagttttttccaacacatccaactaatatctctatgaccactcttcatacaacaaggaacactcacacacagtaagaaggcattgcgaaactcggtctaacttgttctcttctaggccactatttcaaaacaaaaaagtttctcacaaacaattgttttttaagaaattaatatgggatatattaacaacaacgataagctctttagtataaggtgtactagagaaaccatctaaaaaaataaactgtcatataaagtgcgtttgatttgctaaaaaaatgaaggacaggacagaacaactctagttgtccagtgtttgatttgtaaaactgtttcaggtacaggacaaactggaggcaagggacaggacaaaaactcatatttttgtccctcaccaaaccacaacacaactttttgtcccacgtacaaattgtctaaaataccaaaatagtattttgtccctaaaaaatcgtaaaacaaaaaaattactcaatgccataaaaaatttgtcatgtgttgttctgccttgtgttgtactgttctatcttgtactgttctgtccagtacttgttgttttgcaaaccaaacacacccataaagtatatacaagaacaaaggctagtcaatacccatacaaagcaaatgatccgactaccatctctgagaaccgtacacaaacgtggcgttattagcttttaaccaccaaaacgaattaaatttaatttatctaagagttataagataggagtttcaatgttgttgaatagcctattattgcgatcattctcacaaataataagtataatctgtatttttttttgaaggaagtataatctgtacttaatggatccaaaagttaaccataagtaactattaatttcggttggacattttttgtaacatatttacccttaaaacaccgttcttttaaaatttaaatgtaaatatacatcataattaaataggtccttaaaaaaaatcataactaaataggactattaaacaaattacaaatttaacaacaatacagttcaatccaaattcaaattttaaaaaatataaaacatgattattgaaaaataaatttagattaagatatcttgtacaattatcttatcttttttatctgaataattgtactcgtcttatctttttttaaatcatagcttgtgtacccttaaaaaaaatcataccttgtgtaaaaattcataatcatatttacatcgttccttttcattttataactaatttcttttcttttgattgcagggattgattcttcaataacttcgacaagaaagtcgttaggacgaacactttaaattgaaagacaactttcatgacgacatgttggtacttgtgaaagtggaggaatataactattttttaagctaatttcatccgctcgaacaacccaatttctttaattcggagattcgtccaagatattgaagactgtaacttggagcatcttcatattggtgcattgttgaaggacatcatctatataagttggaagcggcctcaagaaggttggaccaagctcaacatgatggtgcttgcaaagatacgagggttattgctggatgtggcgatctttttcgtgattcagacggtagatggatcaaaggctacactaagaagattggagcttgtgatgccttatatgttgagattttgatcgacatgatttctgataatttcaagttcaatgagaatattcctgttttagtttaccggatctgaaagttgccgaagatgagttgaaatgttcaactcaaccatacttgacgtgaaggaaataggagtgctgattggctcgttaacttaagcatttctacggatcactttaatttactaatgttggagtctccttctagcgaggtccaaagaatccttttagatgatttatccaggacttgcatgcctaggaatcttcgattagctttttagttctatttttttttctttgccctcttgtaaaaaaataaaaataaagatctttgaaagtacagaatgtatttatatatgtaatttttttcctcaaataccaatatatactactagtataagtagagtatatttacattatcgtagagtacgtgaatgaatataagtaaattcagtagggaagagtaaaaattaacgagtttggtagccgtcatcttttgcaccatctactctcaaatccaattttttttactacacaacacaataatctctctctctctctctctctctctctctctctctctctctctcacatagtctctctcatgtacactactagcaattactacacctcttacgcccaccattaaatgcaattgcaccatctcaatacactcagcaataactcatcactgccacaattttcctctccatccgttcactcttatttcctttctcttccttcaattcctttgtcctctcaccttcttcatcgtcttcatcttcttttcttcttctttctctctttaaacaatctactaccttttttaagctagaccgtccaaaaacactcatcaagctttcgttgcttaatttattaccatatacccaactttccataacttcctcaaaaaaaccttctcttcttttttcatattcatctttgaaaaaagtgtcttttctttttacttctttttgtgcaccatagtagatctacattttttcttcctcttctagcttctatctctctttagcaactacccttcctcttggtaagtggaaaaaaaaagtctttgttatcattaattcatttcacatctcattcacaccaatatcattgtttttgtaaaactaaatctgttcacaagtttttttcttttaaaaatacttatgtctccgtccatatagttagggttgctagaatgtcatatatttattttttgtttttttttccatcttttttctttctttctgattatgcttgttcctatgctgatttcaaatataacaaaagaatttaacatgcattttaattatgcttaaaaattcttagaagcataaagaaaaaaaatctggactttgatcaccccaatattttttagtttttggttataaagtgaggtcacgtttttatatttgagtatttttttttctctcatgttattgatgtttttgtttcctttttgaagtggcacattaatctcattgaaacaccgctaaagctgacagaagaatctaacaaagaattcatcatctgaaagccatttaaggatctaagaaaagagagagaaaaaattaaaagaaggattttctagttgaagcttttttgattgaaatatgcaagctggtttaatgattccagctagtaacatgcattcaatgatcggaagaaacaacaataacgttggtgtctttggtttatcttcatctctctctttatcccaggtgaatcttcttgtttttttttttccttcacatttctatcaaaatttttagtatattaaattaataataataataacaattttgttctaatgttaatttaatttgataaagggtcatctattttgactttatctttgcaaagataattattttctcttaagtcaacatttggtctttattgaaagaacaacctaaacaaacaaaaaaacctttcattgtattttaccagtccaagtatccttctcgttattcggaaaccgcgttattccttttcactttttcactatttaaattcattttcctcaaaaacatcaacttagtcaaattcacatgtttttctttttcatcaagtttctccaatttaattagaaaaaataaataaacaaaaattgtttttgttgattttgttttttgttgttgttgaatgtactatgtactatgtatgtactatactatatattatgtgttaaattgtttttgttagattgaaaacaataagcatttggaatcttaaagatctgtagaaa

SEQ ID NO: 73 - DNA, 3897 bp, Medicago trunculata
  source 1..3897: mol_type = unassigned DNA
tgattactctagagagtaagttttttccaacacatccaactaatatctctatgaccactcttcatacaacaaggaacactcacacacagtaagaaggcattgcgaaactcggtctaacttgttctcttctaggccactatttcaaaacaaaaaagtttctcacaaacaattgttttttaagaaattaatatgggatatattaacaacaacgataagctctttagtataaggtgtactagagaaaccatctaaaaaaataaactgtcatataaagtgcgtttgatttgctaaaaaaatgaaggacaggacagaacaactctagttgtccagtgtttgatttgtaaaactgtttcaggtacaggacaaactggaggcaagggacaggacaaaaactcatatttttgtccctcaccaaaccacaacacaactttttgtcccacgtacaaattgtctaaaataccaaaatagtattttgtccctaaaaaatcgtaaaacaaaaaaattactcaatgccataaaaaatttgtcatgtgttgttctgccttgtgttgtactgttctatcttgtactgttctgtccagtacttgttgttttgcaaaccaaacacacccataaagtatatacaagaacaaaggctagtcaatacccatacaaagcaaatgatccgactaccatctctgagaaccgtacacaaacgtggcgttattagcttttaaccaccaaaacgaattaaatttaatttatctaagagttataagataggagtttcaatgttgttgaatagcctattattgcgatcattctcacaaataataagtataatctgtatttttttttgaaggaagtataatctgtacttaatggatccaaaagttaaccataagtaactattaatttcggttggacattttttgtaacatatttacccttaaaacaccgttcttttaaaatttaaatgtaaatatacatcataattaaataggtccttaaaaaaaatcataactaaataggactattaaacaaattacaaatttaacaacaatacagttcaatccaaattcaaattttaaaaaatataaaacatgattattgaaaaataaatttagattaagatatcttgtacaattatcttatcttttttatctgaataattgtactcgtcttatctttttttaaatcatagcttgtgtacccttaaaaaaaatcataccttgtgtaaaaattcataatcatatttacatcgttccttttcattttataactaatttcttttcttttgattgcagggattgattcttcaataacttcgacaagaaagtcgttaggacgaacactttaaattgaaagacaactttcatgacgacatgttggtacttgtgaaagtggaggaatataactattttttaagctaatttcatccgctcgaacaacccaatttctttaattcggagattcgtccaagatattgaagactgtaacttggagcatcttcatattggtgcattgttgaaggacatcatctatataagttggaagcggcctcaagaaggttggaccaagctcaacatgatggtgcttgcaaagatacgagggttattgctggatgtggcgatctttttcgtgattcagacggtagatggatcaaaggctacactaagaagattggagcttgtgatgccttatatgttgagattttgatcgacatgatttctgataatttcaagttcaatgagaatattcctgttttagtttaccggatctgaaagttgccgaagatgagttgaaatgttcaactcaaccatacttgacgtgaaggaaataggagtgctgattggctcgttaacttaagcatttctacggatcactttaatttactaatgttggagtctccttctagcgaggtccaaagaatccttttagatgatttatccaggacttgcatgcctaggaatcttcgattagctttttagttctatttttttttctttgccctcttgtaaaaaaataaaaataaagatctttgaaagtacagaatgtatttatatatgtaatttttttcctcaaataccaatatatactactagtataagtagagtatatttacattatcgtagagtacgtgaatgaatataagtaaattcagtagggaagagtaaaaattaacgagtttggtagccgtcatcttttgcaccatctactctcaaatccaattttttttactacacaacacaataatctctctctctctctctctctctctctctctctctctctctctcacatagtctctctcatgtacactactagcaattactacacctcttacgcccaccattaaatgcaattgcaccatctcaatacactcagcaataactcatcactgccacaattttcctctccatccgttcactcttatttcctttctcttccttcaattcctttgtcctctcaccttcttcatcgtcttcatcttcttttcttcttctttctctctttaaacaatctactaccttttttaagctagaccgtccaaaaacactcatcaagctttcgttgcttaatttattaccatatacccaactttccataacttcctcaaaaaaaccttctcttcttttttcatattcatctttgaaaaaagtgtcttttctttttacttctttttgtgcaccatagtagatctacattttttcttcctcttctagcttctatctctctttagcaactacccttcctcttggtaagtggaaaaaaaaagtctttgttatcattaattcatttcacatctcattcacaccaatatcattgtttttgtaaaactaaatctgttcacaagtttttttcttttaaaaatacttatgtctccgtccatatagttagggttgctagaatgtcatatatttattttttgtttttttttccatcttttttctttctttctgattatgcttgttcctatgctgatttcaaatataacaaaagaatttaacatgcattttaattatgcttaaaaattcttagaagcataaagaaaaaaaatctggactttgatcaccccaatattttttagtttttggttataaagtgaggtcacgtttttatatttgagtatttttttttctctcatgttattgatgtttttgtttcctttttgaagtggcacattaatctcattgaaacaccgctaaagctgacagaagaatctaacaaagaattcatcatctgaaagccatttaaggatctaagaaaagagagagaaaaaattaaaagaaggattttctagttgaagcttttttgattgaaatatgcaagctggtttaatgattccagctagtaacatgcattcaatgatcggaagaaacaacaataacgttggtgtctttggtttatcttcatctctctctttatcccaggtgaatcttcttgtttttttttttccttcacatttctatcaaaatttttagtatattaaattaataataataataacaattttgttctaatgttaatttaatttgataaagggtcatctattttgactttatctttgcaaagataattattttctcttaagtcaacatttggtctttattgaaagaacaacctaaacaaacaaaaaaacctttcattgtattttaccagtccaagtatccttctcgttattcggaaaccgcgttattccttttcactttttcactatttaaattcattttcctcaaaaacatcaacttagtcaaattcacatgtttttctttttcatcaagtttctccaatttaattagaaaaaataaataaacaaaaattgtttttgttgattttgttttttgttgttgttgaatgtactatgtactatgtatgtactatactatatattatgtgttaaattgtttttgttag

SEQ ID NO: 74 - DNA, 3000 bp, Arabidopsis thaliana
  source 1..3000: mol_type = unassigned DNA
acgtacgtataactccatctatatatctgtacctacatatatacagtaaaaatcagaaataagttgggttattgtttttttatatatagttattttaaagaatctaggtaaagtataaacttactgaaaagaaaaacttgagtgttaaagctatagctataaggactttaaaaaaaaaaacaaagcttaagaactaggtaattaaatacgcagtatatttctctatatattcgcgtgataaattaagatgaatgcatggcttttacaaattatcacctttttaatgggtgatccgtattttaaatagcttaattgcacgttatagttataaatgcttgggccacaaagtaattaatatttctaggcatgtaaaatgaagtcttactgtgaaaaaagtgatatttcattgacttccttaaattgaaaaaacaattgtttcgtaaacaaaactcaaaattaaggtgatgatttttagattttcttcttttaaatgaaataaaataaatacatcactcaatcaacttctgtctgactaacaataatacaacctaaacttctataatatttaagaaaatgccatgtggaagaagaatcatgaaattttccttctttacaattaaatttataacaaagatatgaaataataataaaataaaatagttaaaaatataatagtcatattttttgaaagtaaaaattaaatttatatctcataaagataaatattaactataacaagtcattgaattttagttaaaaaactatataatttttttccatattataaataatctaagagtattaaaatttcagaaaattacttttaaaattgtatccttgacaaatggggactattgtctaactttttctgtaaatggagaactgtattaaagcaaatttcaatatagttaaatctttttttaatatagttaattttgttaagtggtgatttattgcatatgcataagttatgaataatgctaatgattttttaaaaataactacatatctaatagataaatgtaagtctcataggctcatagaccgttagccgtcattcctcaccacattataatattttaaataaataaaaaataaaattattttaggttgacattgtatataagatgaaaaacaacacataattttgtaacataaataaaataaattgtaacatatctctctctctctatatatatataagcgtgtaggataattaagtgtccctctcgcaccatttaatttcattgcaccctctcaattctctctgtcattactctctcatctctcttcctccaagatttgcacctacctttcaaaccttttgctcgccaacaaaaccgcgcttcacaaaaccatcagcggttttccgagaaacaaatctcagaccagacaccgctctactcttctctctctctccctctagggtttcgtcgcttcttcctatatcccagtgtatgtctcgaaaacctcatcatttctgctgttttctttattttatccattaattcatgtacacaaatttatttgtttaaagtatcattggatccattacacttcagttttcttagcatctttataaaactctcactttcatgatgttttttttttataatttaatatatcctgtatgttgaattttcagttagtcatctatattttgtcttaaattttgccttctttagcattaattaattgatttcttgcctctaatatctttcattcctctcctaatttgctttctgactttctgatttattgtattcttctttaaataatcttatcaatttctgcatagtcagagatgaaaccttcaagaaaacaataaagaggaaagattaaaggttagtattcccttgcctaccaaaaaaaacagaaaggtttgtattctcttcgtatatccttattttcattatacgtttggttttatatataaacacgtgtatatactttatagtagtagtatacatttacatattaatgtgtgtaataaaaacgtttaaatacgatgatgatgataagaaatagctggaaaaaattaatacatcacccaggccttatgtcacgttggttgtaagttgtataataactatatgttggtccgtcgcacaggtgcacagatataatactatttttttcatttcaatttttttttctttcttaatcgccaaatagtagtttacactttttcctgaagagtttttattttttgaaaatctactaatgattatatttaattaaattttgttttgttctcacgaaaatattgtttttttaataaacaggatagagttgggaatttatttgtacctactttttcccattttatttgctttgaacaaatgagtccaacatttctcttttcgtcttctctttcctatcccatctaaatcaaaactgatcaaaatacctcgaaattttaaattaaatcaccatccatcaaagctattatagtgtagaaattttaaagttttttctttggacaacaattgatttccatctacactacatatgatatgactcttgaatcaatcatagtttttatttcagtctgctgattagtttttttcttttcttttaaaagggtaaaaaatcggtagtttcgaataattttgagtatgtgaaaattcattatttttgggttggttattcaataacaaattaatttgtgattgtgatgtcttttttatgcaaggctcttttttcttgctttcaattagtgggtcctttgtttcctacaatcatctccaattcttctgtttgcttatatcattttgtatgatcttcaagaagaaagataaacgactccgaagaaagatttaagttattgttgttcatacaaaaagaaggttgtaaagttgttgacgtggacaaaagtattgccatatttttccagcctcgaagaaatttcccttcttcttcaaaccctaaattttgacaaaactctctacttttttttgcttctagggtttgctttcagtttccggagtataagaaaag

SEQ ID NO: 75 - DNA, 3641 bp, Glycine max
  source 1..3641: mol_type = unassigned DNA
tatatcatttgtttttaatgaagttatttttggtttagtttcttttaatgaagttactataaatttaattatagttgttcaaactaatatttagtccgaacaaaatacaaattggctaccgctatgcgctatctaacaaaattttccgagtcataacatgcagatgcatgcggttcaaaattaatacttgcactcatcataaaatttgttcatatataggtaagactttccacgtcaaatataaattaaagtgcatagaacaaaaataattaaattgcaaatgtattttatggtaaattgcaattctttataataatgtactatacaatatttatttagaaaacaaaatcttgcgttacgaattaatttttttaatgtagttacgaattgaattacacggttacaagtaccatgcatttttatatgctaagagaaattcatatttttaatcaatcttttacgaagtgactagcttacacggttacactacattgtaatcaaattatattatatgtagtatcttttttcttttataaaatatattactagtaagtatcttgtgcggatacttttaaacacaaagaaaatataaaaaatacaaaaatatataattttaaaaatataaaaatataatcaacagaatgatttttcttaataatttgaaaatattttatcatgcataatgttaataaaagaaactcaagtattaattaaagaaattaaaaaactaagaaccttctttaatatgattaattgaggaaatatatcgatttaacacatttcaagaaataaaaaatacatgcttatgtaaaatattaaaaatatatataaatgttatatctccgttaaaaacacgtttaaatttagagttcaattaaaatatattgaaaatgtttttttttgtagtattatctaatactgtataaattataccatgtaagataatattcttgattcttgtaagaattactttaaaaatatatctaaacggtttgtaatcatgcaatattataaattttcttatattccgtaaaaaaataatattttattataataatatataaaatcaaactcttatattcataatataggaaatagtagtcttcaaaaaaacaggaacgaataaatcatctcaatcttatcatatcaattattaattacctaatttctttaattaattaaattatcaataaaaaaaaggtgaactttggatcaaataatataaagttatttcaaattaaccaatgttgtaaaatttggatcttaaatatacagtcacattaactttgtaaacaatcttacgcatttgagcaaggttacttccgctgaaagatgtatataagatgaatttgtttaaagttttaaaagataactttaaaataaacattttttaagtaataaatatgggccaatttgtttaaacttgaaaaaataatttaaaaataagtacttttttaaataagtagatagaatttgtgtcagtttgtttaattttatttattgaaataaatgcttattttattaaaataaataactttctatttttttaatgtgttttcctaaattatttctacttgttttaaaaagaaaatatttgcaaaaagacatttatataaaaaaattatttttaagttttttaaaaaaatttaaacaaactcaccgtttgtttcttcaaataagcggatttttttaaaaatagaaacagttaaaaaaaataaaataaacataaaaataaatattttattaaaataaatacttattttaacaaataagtttaaacaaattatcacatgatttacttcttaaaaaaacaaaaaaaaactgtttattttaagtaaaaaaagtctagacaaacacatgataaaatcataaaactacttattttatttttaaaaaaatacttattttaaaaatatgctttaaaataattagctcataatttgcatcaaaaatcacaactcacgaattgggagtgaataaattaatagtaattagcttggctctttttcttattttttactccctattttccttttttataaggcttactagactcttttgcatgaccagcgtctctggtcaaaagaattaataataataataataataaaattcattaaaaatcacattaaaagaatattaataatcacattaaaaacatatttaaaatcacattaaagcacattaatgacattttcaatagtactaagaactctttcaattcttgaaccaatattactcttatcttaatggaaaatactctacacttatccgaacgaaaaaactgcaaaagagaagaagaaatgaatggagtgacacgcacaaattaatttcaagataccagcacttagcaatttagcatttgtttggtagccgtcattcgttgcattgcattgcatttgcatttgcattgcaccgtcaactcgcaaaatatttataagttttatactacaccaaaccaaaaaatatgctgcgtctctttctctctcccctctctagcaattacacctcttttgccctccattaaatgcaattgcaccctctcaatacgctctgcaattactcttcgctgccacattttcctccatctgttccccacttctctctctccttcaatgcccttgtccctctctcttcttcttcttcttcttcttctcactttctctctgtaacaccttctcttcatgatatagcttcttcaccttttttttctttcttttctttgttaccatatataagtaaactagattccataactgtcccaagcccttccttcaaaagggtcctctcttttcaacccaaaacagatctacaccttcatcttccaccaccactctcactggtaagtgctaaaaaatattgataataaaagcttctgtcgcaaccagggtcgcggcgtgtttgtgtggaacattcatgttttgttaaggttctctaaggtcacatttgtttttttttttttttaaacgaaactaatgaagctgtttggtacattttgtgagttctactaacattttccgggtgagtcgcttgcagctagggctgtgagaaaaggaacgttattaggtctgtaagaaaaaagaaaatatcctgaaatataggatgcgttgtaggattctccgagatcttcgtgttgttttattttataaataaaaaagttttgattttgttttgtgaaaaggcaaaagatcagataagggttacaatatttcttttcttttttattctgtttacatatattgatgatatatatatgcatagcgtatatttgtttcgaaattttgataagtttttatctttttaattttttttcggccgtttgtataactgagttttgtagtaacacactgactcgctttgacattgtcatctgacagaatccaagggctcaacctcttaagctttttctctatccaagaacctcttaagagagagaaagaataagagaaagagaaagtgagagagccaattctacatttgttggtggtggtttttgaggcatgtgaaataatccaagggctcaacctcttaagctttttctctatccaagaacctcttaagagagagaaagaataagagaaagagaaagtgagagagccaattctacatttgttggtggtggtttttgaggcatgtgaaat

SEQ ID NO: 76 - DNA, 3509 bp, Glycine max
  source 1..3509: mol_type = unassigned DNA
tatatcatttgtttttaatgaagttatttttggtttagtttcttttaatgaagttactataaatttaattatagttgttcaaactaatatttagtccgaacaaaatacaaattggctaccgctatgcgctatctaacaaaattttccgagtcataacatgcagatgcatgcggttcaaaattaatacttgcactcatcataaaatttgttcatatataggtaagactttccacgtcaaatataaattaaagtgcatagaacaaaaataattaaattgcaaatgtattttatggtaaattgcaattctttataataatgtactatacaatatttatttagaaaacaaaatcttgcgttacgaattaatttttttaatgtagttacgaattgaattacacggttacaagtaccatgcatttttatatgctaagagaaattcatatttttaatcaatcttttacgaagtgactagcttacacggttacactacattgtaatcaaattatattatatgtagtatcttttttcttttataaaatatattactagtaagtatcttgtgcggatacttttaaacacaaagaaaatataaaaaatacaaaaatatataattttaaaaatataaaaatataatcaacagaatgatttttcttaataatttgaaaatattttatcatgcataatgttaataaaagaaactcaagtattaattaaagaaattaaaaaactaagaaccttctttaatatgattaattgaggaaatatatcgatttaacacatttcaagaaataaaaaatacatgcttatgtaaaatattaaaaatatatataaatgttatatctccgttaaaaacacgtttaaatttagagttcaattaaaatatattgaaaatgtttttttttgtagtattatctaatactgtataaattataccatgtaagataatattcttgattcttgtaagaattactttaaaaatatatctaaacggtttgtaatcatgcaatattataaattttcttatattccgtaaaaaaataatattttattataataatatataaaatcaaactcttatattcataatataggaaatagtagtcttcaaaaaaacaggaacgaataaatcatctcaatcttatcatatcaattattaattacctaatttctttaattaattaaattatcaataaaaaaaaggtgaactttggatcaaataatataaagttatttcaaattaaccaatgttgtaaaatttggatcttaaatatacagtcacattaactttgtaaacaatcttacgcatttgagcaaggttacttccgctgaaagatgtatataagatgaatttgtttaaagttttaaaagataactttaaaataaacattttttaagtaataaatatgggccaatttgtttaaacttgaaaaaataatttaaaaataagtacttttttaaataagtagatagaatttgtgtcagtttgtttaattttatttattgaaataaatgcttattttattaaaataaataactttctatttttttaatgtgttttcctaaattatttctacttgttttaaaaagaaaatatttgcaaaaagacatttatataaaaaaattatttttaagttttttaaaaaaatttaaacaaactcaccgtttgtttcttcaaataagcggatttttttaaaaatagaaacagttaaaaaaaataaaataaacataaaaataaatattttattaaaataaatacttattttaacaaataagtttaaacaaattatcacatgatttacttcttaaaaaaacaaaaaaaaactgtttattttaagtaaaaaaagtctagacaaacacatgataaaatcataaaactacttattttatttttaaaaaaatacttattttaaaaatatgctttaaaataattagctcataatttgcatcaaaaatcacaactcacgaattgggagtgaataaattaatagtaattagcttggctctttttcttattttttactccctattttccttttttataaggcttactagactcttttgcatgaccagcgtctctggtcaaaagaattaataataataataataataaaattcattaaaaatcacattaaaagaatattaataatcacattaaaaacatatttaaaatcacattaaagcacattaatgacattttcaatagtactaagaactctttcaattcttgaaccaatattactcttatcttaatggaaaatactctacacttatccgaacgaaaaaactgcaaaagagaagaagaaatgaatggagtgacacgcacaaattaatttcaagataccagcacttagcaatttagcatttgtttggtagccgtcattcgttgcattgcattgcatttgcatttgcattgcaccgtcaactcgcaaaatatttataagttttatactacaccaaaccaaaaaatatgctgcgtctctttctctctcccctctctagcaattacacctcttttgccctccattaaatgcaattgcaccctctcaatacgctctgcaattactcttcgctgccacattttcctccatctgttccccacttctctctctccttcaatgcccttgtccctctctcttcttcttcttcttcttcttctcactttctctctgtaacaccttctcttcatgatatagcttcttcaccttttttttctttcttttctttgttaccatatataagtaaactagattccataactgtcccaagcccttccttcaaaagggtcctctcttttcaacccaaaacagatctacaccttcatcttccaccaccactctcactggtaagtgctaaaaaatattgataataaaagcttctgtcgcaaccagggtcgcggcgtgtttgtgtggaacattcatgttttgttaaggttctctaaggtcacatttgtttttttttttttttaaacgaaactaatgaagctgtttggtacattttgtgagttctactaacattttccgggtgagtcgcttgcagctagggctgtgagaaaaggaacgttattaggtctgtaagaaaaaagaaaatatcctgaaatataggatgcgttgtaggattctccgagatcttcgtgttgttttattttataaataaaaaagttttgattttgttttgtgaaaaggcaaaagatcagataagggttacaatatttcttttcttttttattctgtttacatatattgatgatatatatatgcatagcgtatatttgtttcgaaattttgataagtttttatctttttaattttttttcggccgtttgtataactgagttttgtagtaacacactgactcgctttgacattgtcatctgacagaatccaagggctcaacctcttaagctttttctctatccaagaacctcttaagagagagaaagaataagagaaagagaaagtgagagagccaattctacatttgttggtggtggtttttgaggcatgtgaaat

SEQ ID NO: 77 - DNA, 3000 bp, Sorghum bicolor
  source 1..3000: mol_type = unassigned DNA
ttcactactttattattttctgagcaggaaaaagttatgtttcctttgcaaaaaatgggacccacacgcacggcaagaagccgtgccgtgccgtgccgcggcatggaaacagtactacactccaggactgcatgcactccgttgcagtgaaccatgcatcgatctcttcgcccgttcctctggaaactcataacttttttttttaaagagagaaacccctcaaacaaattaaattggatcatttgcacggatttcatcttgccggtcgtctgttgtgtatactgcaaatgagaattacgtattttgtggaagtccttcgtcttgtttttttatccttggccttgtttagtttcgaaaaatttcggatttcgctattataacactttagtttttatttgacaaatattgtctaatcatgaactaactatgatcaaaagatttatctcgcgatttacaaacaaattgtgtaattagtttttatttttgtttatatttaatgatttatgcatttgccgcaagattcgatgtgacggagaatcttgaaaactttttggatctctgagggaactaaacaacgcccttgtctaacacatgtatccccaatttcatcttgacggagggatataacgatcgagtcaaacctctgcatggatgggtgcactattggcgtgtagcagtatatggcgccaggaaaaagttaaaactaaagaaatggatcttttaacaagtactccctccgtcagcaacatgccggagctgtgtttaaagttagttttaatgaagttttattaaagttttatacatattaaatatgctgatgtaacattgtattgatgaagagagatgataaaaattttatgagataaagttttattctaataaaactcttctgcactatttctaaatatgactgcgttaaaaattgagtcatgaaatccgccgtcgaggatggcctaaagggcactcacaatgcagactctatcatagagtctaaggttatttattacctcgaacaatgtggacttagagtctaaataagacttggagtcttattttttctatctttttcttcaataaatataatgacatatcaacaaaatatcataaataatatgtaattaattgtcttagactctatgatagagttttgcattgtgaggctagtctcaatgcatgtttcatgagagtgtcatgcacattaaatagggtgtcacataagcaaaattgctgacttggcagggtcattaaatgaaggagtttcatcagatgagagagaagtttcatcctcatgaaactcatatggctcgattatctagtttatagtcttggtaactgtaccatgaaactatacattgacactggctgagtgtcctagcatggctcttatcctttggccagaactgaagagacgctatgtatatccatggctatctggaactttcctctctccatcactcagtaattacgccggttatctaatctgaaacatttgtcaatgtactgagtattcagcagaaaacgtaccacctgccgaagtactatatcgtagccgcgattaattgactaataagacaattgaaaaatagactgatattaccctcttagcctataaaagaatgtaactatgaaaccggtcaaactaatttaaatttaattagatttatagtaaataatattagtatttatatctttaaataaatttataataaaactgtattctataacaaacatatattctataactaatttaataatatttattttatataataatagataacattttttatataaatttagtcaaagtttaaacgatcgatctcgttacttaaaaaataaggagtagttagtatttttttattcgagttacagtactaaatgatatataagtctatctctacatggaaatgcatgatcatcgacttgccagcctttattttctcctctccttcatgatgactatacatagctcgaaaataaattaatatatatgtcatgcagatacatgaacgttcattttcacattcatttgccaaaaaaactacatatgacgacgtccaataaatccaaaacacatgacatatcgtgcatgtttctccttatatacaagtactataccaggccttgtttagttccaattttttttgcaaaatagaaatagtagcactttcgtttgtatttgataaatattgtctaatcatgaactaactagtctcaaaatattcgtctcgtcaatttcgtccaaactgtgcaattagtttttattttcgtctatatttaatacttcatgcatgcgtctaaagatttgatgtgatggagaatctgaaaaattttgcaaaattttttgggaactaaacaaggccccaatatacttgtagaaatagaaatatataataataaaaaatcatgcatccgtctctctctcgctctgctagcaattacgatacggcctctcaataaatgcggattgcaccacctcaacactcgtccgcaataactccttcctcccttctccacattctcttccacctccgtccgttcccctccccttcctcttcctctcctcccccttccatggccgccgcttagcttcgttctcaaggcctcctccctctcgccacacacctcctgctagctacccttctgagcttgcaaagttttgccgcatcacatcgatcttgagagctgcagcaggcagagatcgatcagagttctatttttgcagaggcacacaaacatatatagttcctgtatctgctagatctcactgccagccagctcgcagtgaagcttctctgggctaccttgtcgctagatctgttgctggtcgtgctgttacttggcaggcaaggtatacatctccatataggaataggattggcgccgcctgttttcttgggttgtgagggagatatactacgcatgtgccagtgaataaatgggaagcagctagtgaggaggcaataagaatcagggtttgagaggtcgcgagaggagaaa

SEQ ID NO: 78 - DNA, 2500 bp, Sorghum bicolor
  source 1..2500: mol_type = unassigned DNA
ttcactactttattattttctgagcaggaaaaagttatgtttcctttgcaaaaaatgggacccacacgcacggcaagaagccgtgccgtgccgtgccgcggcatggaaacagtactacactccaggactgcatgcactccgttgcagtgaaccatgcatcgatctcttcgcccgttcctctggaaactcataacttttttttttaaagagagaaacccctcaaacaaattaaattggatcatttgcacggatttcatcttgccggtcgtctgttgtgtatactgcaaatgagaattacgtattttgtggaagtccttcgtcttgtttttttatccttggccttgtttagtttcgaaaaatttcggatttcgctattataacactttagtttttatttgacaaatattgtctaatcatgaactaactatgatcaaaagatttatctcgcgatttacaaacaaattgtgtaattagtttttatttttgtttatatttaatgatttatgcatttgccgcaagattcgatgtgacggagaatcttgaaaactttttggatctctgagggaactaaacaacgcccttgtctaacacatgtatccccaatttcatcttgacggagggatataacgatcgagtcaaacctctgcatggatgggtgcactattggcgtgtagcagtatatggcgccaggaaaaagttaaaactaaagaaatggatcttttaacaagtactccctccgtcagcaacatgccggagctgtgtttaaagttagttttaatgaagttttattaaagttttatacatattaaatatgctgatgtaacattgtattgatgaagagagatgataaaaattttatgagataaagttttattctaataaaactcttctgcactatttctaaatatgactgcgttaaaaattgagtcatgaaatccgccgtcgaggatggcctaaagggcactcacaatgcagactctatcatagagtctaaggttatttattacctcgaacaatgtggacttagagtctaaataagacttggagtcttattttttctatctttttcttcaataaatataatgacatatcaacaaaatatcataaataatatgtaattaattgtcttagactctatgatagagttttgcattgtgaggctagtctcaatgcatgtttcatgagagtgtcatgcacattaaatagggtgtcacataagcaaaattgctgacttggcagggtcattaaatgaaggagtttcatcagatgagagagaagtttcatcctcatgaaactcatatggctcgattatctagtttatagtcttggtaactgtaccatgaaactatacattgacactggctgagtgtcctagcatggctcttatcctttggccagaactgaagagacgctatgtatatccatggctatctggaactttcctctctccatcactcagtaattacgccggttatctaatctgaaacatttgtcaatgtactgagtattcagcagaaaacgtaccacctgccgaagtactatatcgtagccgcgattaattgactaataagacaattgaaaaatagactgatattaccctcttagcctataaaagaatgtaactatgaaaccggtcaaactaatttaaatttaattagatttatagtaaataatattagtatttatatctttaaataaatttataataaaactgtattctataacaaacatatattctataactaatttaataatatttattttatataataatagataacattttttatataaatttagtcaaagtttaaacgatcgatctcgttacttaaaaaataaggagtagttagtatttttttattcgagttacagtactaaatgatatataagtctatctctacatggaaatgcatgatcatcgacttgccagcctttattttctcctctccttcatgatgactatacatagctcgaaaataaattaatatatatgtcatgcagatacatgaacgttcattttcacattcatttgccaaaaaaactacatatgacgacgtccaataaatccaaaacacatgacatatcgtgcatgtttctccttatatacaagtactataccaggccttgtttagttccaattttttttgcaaaatagaaatagtagcactttcgtttgtatttgataaatattgtctaatcatgaactaactagtctcaaaatattcgtctcgtcaatttcgtccaaactgtgcaattagtttttattttcgtctatatttaatacttcatgcatgcgtctaaagatttgatgtgatggagaatctgaaaaattttgcaaaattttttgggaactaaacaaggccccaatatacttgtagaaatagaaatatataataataaaaaatcatgcatccgtctctctctcgctctgctagcaattacgatacggcctctcaataaatgcggattgcaccacctcaacactcgtccgcaataactc

SEQ ID NO: 79 - DNA, 1204 bp, Arabidopsis thaliana
  source 1..1204: mol_type = unassigned DNA
atatcggttgttgacgattaaccatgcaaaaaagaaacattaattgcgaatgtaaataacaaaacatgtaactcttgtagatatacatgtatcgacatttaaacccgaatatatatgtatacctataatttctctgattttcacgctacctgccacgtacatgggtgataggtccaaactcacaagtaaaagtttacgtacagtgaattcgtctttttgggtataaacgtacatttaatttacacgtaagaaaggattaccaattctttcatttatggtaccagacagagttaaggcaaacaagagaaacatatagagttttgatatgttttcttggataaatattaaattgatgcaatatttagggatggacacaaggtaatatatgccttttaaggtatatgtgctatatgaatcgtttcgcatgggtactaaaattatttgtccttactttatataaacaaattccaacaaaatcaagtttttgctaaaactagtttatttgcgggttatttaattacctatcatattacttgtaatatcattcgtatgttaacgggtaaaccaaaccaaaccggatattgaactattaaaaatcttgtaaatttgacacaaactaatgaatatctaaattatgttactgctatgataacgaccatttttgtttttgagaaccataatataaattacaggtacgtgacaagtactaagtatttatatccacctttagtcacagtaccaatattgcgcctaccgggcaacgtgaacgtgatcatcaaatcaaagtagttaccaaacgctttgatctcgataaaactaaaagctgacacgtcttgctgtttcttaatttatttctcttacaacgacaattttgagaaatatgaaatttttatatcgaaagggaacagtccttatcatttgctcccatcacttgcttttgtctagttacaactggaaatcgaagagaagtattacaaaaacatttttctcgtcatttataaaaaaatgacaaaaaattaaatagagagcaaagcaagagcgttgggtgacgttggtctcttcattaactcctctcatctaccccttcctctgttcgcctttatatccttcaccttccctctctcatcttcattaactcatcttcaaaaataccctaatcacattttgtaacaataatacaattatacattaaaactctccgacg

SEQ ID NO: 80 - DNA, 2605 bp, Arabidopsis thaliana
  source 1..2605: mol_type = unassigned DNA
tgaccaaattctagaagtgacttgataacatgagaggctataaagctggttcctccggtaaccaagtactctgccattttattaggctcctctgattttgtgtaacattgacaaactagatcatgcgattagatggtctaattttattttattttgtgttagaaggatgttcaatcctggttgatttagtttatgtttgacttttttttatgtagtctttgaataatagtagttacatctaactttcataaagacttggattagtataacctaattataagctttgggcttgaagcaaatataatgaactgaatgtgggcttttaaagtatccaaagaggtttatgaaatgtgatatattttttttggtcttcaatctcttgaaaattggttagcaatccattggcagttgaaggctctctcagagaccttgactagaaggcctcaaaggcaaaggaaggtggaaggaaaaatcaaaattcccggagctgaaagttgacacaaaggaatcaacctagttctttcttgtcttagcttttttgaagggaaatgaaaattgacacaaaagaaggtggaaggaaaaatatgatgcttgtcctttattggacatatcattttgcagaatatatattcttcctagcattttgcatgcattgtgtctaggttgtcatgttgtggctggtttactaagttcctagtacaatgaacaaagcgccagagctgaaagttgaaataacaatcgtcaacatcccaaccgccttaacattaaaaccaaccaaaaaaacaaaaacacatcccaaccgaaagcagcaatccaggaagattagtttatgtaaatgacaaacataaatatgaaaccgtcacatagttgagagtcgccgtgaatatttactttttaaataaaaagatatggttagccgctggttggtctgacaccccatgtatcattatactcattatccgtatgaaggaccattttttcatataaggatatacacgtttgtaacgtatgcagagccaacaccaagtatataacttgtactgtcgtctctgattctgttaaagcggttaactagattattgactatgataattcaatgtaacaccaatttatgccccggacaaaaaaaaaatggtgaaaccaaaatatttgatttgcatcccagttactatttccctgcaatgatatgggggcggcggtttggagatatcgccaatgccacaatttgtcgtaaaaacagttaaacattttactcactagtcactccccacaaaaaaaacgatacttagttccactctctactactacaaaacttgtatacattaaaaaacgatttttattgagtagacattaatgatcggcttataagtctaaacaagtaatgtgacagaattcacgtgaacaaatgctcgagtgggatgtttttattgcttctcaagttggtgatctttaatatcgccaagattaggttgtgcattaaatttggattactttttataaattaaatcaagatatggatatgataaactttctctcttttcttttagttaacatactttatagactttatactacattagattaattgcagatttaaacaatgtttaaaattacaaaaacgttaaatgtcatattttccatataaattttgttttacgtaaaagcaatttacatgaattttgataaaatcatgaaaaaacagaagcggtgtccaagattggggatgaatgagaaaacaccgcactgatagtaactgaaaagaatgtaaccagtctcacgatggggatggcggagagaaagagagagacaagacagtagagaaaagaaggtacgacggagagatgaaggttggacagagagaacaaaacgagaacggcaatggccgggaaaaaaggagagtagggaggaaaaaaaaaagaattttgtttttttagcttttgtagggttttttgttagtcgtaaaatataaattataatatcaaagaaaataatgagttaattttaaagaaggttagatgatatttttcacaagtttttgttgatatagtaaacccacaattttattttgtcattcaaagtaaattttcaacaaaatatagctgttgctggtcacattttaacgggaaaaaataattcttgtacctggatgtataacctctgaaccttgtattacaaatttacaaaacacattgatctcaatcagaccgaacatgtatatcgagtcaactgacaaatctcttttcctactcttgttacatattctttctaggaaaaaaaaatgctttcaggctcaatgaaatgaattaaaacagcaaaaggttggtaaaagtctttttccccataatcatttgctccataattgacgtttgtctggcaacaactggaaacacagatatagaaaaaaagattggacagtaaatcataaaaaaaaaaaagcaaaattaaatagaaagacgaagcgagagaaagagcgttgagtggcgtgagagtttgagtccgaaaattaactcctctcccatctgccaactttcctctgtttctcctttatatcccaaacctattcttcctccacacctcatcataggcatagcaaaactcttccaaa

SEQ ID NO: 81 - DNA, 2500 bp, Arabidopsis thaliana
  source 1..2500: mol_type = unassigned DNA
tgaccaaattctagaagtgacttgataacatgagaggctataaagctggttcctccggtaaccaagtactctgccattttattaggctcctctgattttgtgtaacattgacaaactagatcatgcgattagatggtctaattttattttattttgtgttagaaggatgttcaatcctggttgatttagtttatgtttgacttttttttatgtagtctttgaataatagtagttacatctaactttcataaagacttggattagtataacctaattataagctttgggcttgaagcaaatataatgaactgaatgtgggcttttaaagtatccaaagaggtttatgaaatgtgatatattttttttggtcttcaatctcttgaaaattggttagcaatccattggcagttgaaggctctctcagagaccttgactagaaggcctcaaaggcaaaggaaggtggaaggaaaaatcaaaattcccggagctgaaagttgacacaaaggaatcaacctagttctttcttgtcttagcttttttgaagggaaatgaaaattgacacaaaagaaggtggaaggaaaaatatgatgcttgtcctttattggacatatcattttgcagaatatatattcttcctagcattttgcatgcattgtgtctaggttgtcatgttgtggctggtttactaagttcctagtacaatgaacaaagcgccagagctgaaagttgaaataacaatcgtcaacatcccaaccgccttaacattaaaaccaaccaaaaaaacaaaaacacatcccaaccgaaagcagcaatccaggaagattagtttatgtaaatgacaaacataaatatgaaaccgtcacatagttgagagtcgccgtgaatatttactttttaaataaaaagatatggttagccgctggttggtctgacaccccatgtatcattatactcattatccgtatgaaggaccattttttcatataaggatatacacgtttgtaacgtatgcagagccaacaccaagtatataacttgtactgtcgtctctgattctgttaaagcggttaactagattattgactatgataattcaatgtaacaccaatttatgccccggacaaaaaaaaaatggtgaaaccaaaatatttgatttgcatcccagttactatttccctgcaatgatatgggggcggcggtttggagatatcgccaatgccacaatttgtcgtaaaaacagttaaacattttactcactagtcactccccacaaaaaaaacgatacttagttccactctctactactacaaaacttgtatacattaaaaaacgatttttattgagtagacattaatgatcggcttataagtctaaacaagtaatgtgacagaattcacgtgaacaaatgctcgagtgggatgtttttattgcttctcaagttggtgatctttaatatcgccaagattaggttgtgcattaaatttggattactttttataaattaaatcaagatatggatatgataaactttctctcttttcttttagttaacatactttatagactttatactacattagattaattgcagatttaaacaatgtttaaaattacaaaaacgttaaatgtcatattttccatataaattttgttttacgtaaaagcaatttacatgaattttgataaaatcatgaaaaaacagaagcggtgtccaagattggggatgaatgagaaaacaccgcactgatagtaactgaaaagaatgtaaccagtctcacgatggggatggcggagagaaagagagagacaagacagtagagaaaagaaggtacgacggagagatgaaggttggacagagagaacaaaacgagaacggcaatggccgggaaaaaaggagagtagggaggaaaaaaaaaagaattttgtttttttagcttttgtagggttttttgttagtcgtaaaatataaattataatatcaaagaaaataatgagttaattttaaagaaggttagatgatatttttcacaagtttttgttgatatagtaaacccacaattttattttgtcattcaaagtaaattttcaacaaaatatagctgttgctggtcacattttaacgggaaaaaataattcttgtacctggatgtataacctctgaaccttgtattacaaatttacaaaacacattgatctcaatcagaccgaacatgtatatcgagtcaactgacaaatctcttttcctactcttgttacatattctttctaggaaaaaaaaatgctttcaggctcaatgaaatgaattaaaacagcaaaaggttggtaaaagtctttttccccataatcatttgctccataattgacgtttgtctggcaacaactggaaacacagatatagaaaaaaagattggacagtaaatcataaaaaaaaaaaagcaaaattaaatagaaagacgaagcgagagaaagagcgttgagtggcgtgagagtttgagtccga

SEQ ID NO: 82 - DNA, 3455 bp, Glycine max
  source 1..3455: mol_type = unassigned DNA
gagtatttattgagagaatacttgcgagattctttttaatatgttatttactaattattattatttaaaatttattagaaatattttttaaatctcatttcttctattaattttaatcaataaaaaagaaaaaatatattaaaaagtatgctacatatctcatttgttaaaataagagtttattaacttaggagagttttcataagttcacaatttaatttgattctgaataaaaaaaaaagcttatagaatatttgtataactaattaagtctaaataaattttacataaattgtttcaaaccctctaatatatgcactagctcctaactatcttttattatatttaattgcaattttaatgaaatcctcttttgtttcagaagcttatagaataattattttcatttaataaatggtttttatgattctgatgtaatattttaattattttctctctctctctctctctctccctatatatatatatatatatatatatatatatatatatatatatatatatatatatatatatatatatatatattctcctaacaaacctttaaggatttatccaccgctgcatatgccaggctgaaaaacaattatttcattttcgtgggtgtatatataaaaaaaacttgtggaataagagaggtgttgatcgatgagctgtaataaccttcaatcttgagcttcaaacaaactcaagttatggtcttccctatagctagctaatattttttggtgttgatagctagctaatattttggactgcactgtttacactcaacagttcaatttacaccaacttaaccaacaaatcttccttcgattttctgctgcccattgaaactctgcatgtcaaaatgctacttgtcacaaataaaaaaggttgagaaaaaggataataagggaataacaacaatatatacaacatgagcatccgtttactatacgctgcttaatgtcatgcacagtacttatctaagcaaatttttttgacaagatgtgaatgatgtaacaataaacatttcatctctttctataatatatacttagttaggttattatattcgtacaatcagcttctgtatcattttatttccactctcttttttatcttgttttttttcatttctcatcatatttaccaattttttgataaaaaataaccatatttaccgatttttctctctttaatttatttttattttttttatccctctatgtttatctttcttgcacagttgcacttgtaaataatacccttataacttttttcctatatactttcgcaattataatacgcggtttgtctgtccgttgactgttgctatatgtagtatatagcagtacttatttatttattttatcagtacagtacttatttatttcagtgtacgaaagcggttgtttttattttcagatttaaatttgaattcaacctcgtcataatccccaatccaagaacaaagacaaaatttagaagggtacggagaacttaaagtctcacaaatccttttttaattccggatatccacaaattaaccggaagtaggactaattcctgaaaatattaaaatgtatttagtttagggaattaattttttctataaatatttttaatttaatacatatagatgtcgaaattatattaaacctctaattacaaacatataatgatattgagatatacatgattgatcaggagttaaaaatataaaaacaaaaaaagtgaatgaagaaaaaaaaaagaaaataaattgtgagtttaaatttttccagtgatattttaaaaaaataataataaattaatatttatcgtcgataatattagtatctcttactccccttgctctataggctcgaacttattatgattgatggttgtcattcatatgttccactaataaaaggagtaagattgacaaatgaataactagttaaggtgagtgcattaaatcagtaagatacaatactcgttataaattattaaatgaacgaatagtcaatgcttgactgttgacaacctttgaatagtcaatgttatctatttatccttagatggactttggcaacattgatgttaatccagagtggaatgtaaagttttaacgcatagcatgtctaaaatgatatgtatgtagtgtagaatctttatatgtgttatttttttttataaagatgaataatcaataataaagtttatgactgttttccattgatgttatgataaaattaaataaataaatccaaggcaatcacttcaaagacgttataattagacaatatcagcttcttcttctttttttctaaaaatgataaggataaataagtatgaattaatcataacagcacatctttttgtactaaaagatgattcattttaaaaaggtaagcattacgttacgaataaatttgttttcatgatattttgtttgtatgcaacatatttttcaatacaaaaatatttttatataattcaaactaaacataattttaaaattattttttagctaacacaataaaatttatataattaatttaaaaaataattgtgaacaaaataaatcagtaaataattttttcattataagatagcctaaaattattttttataagatttgtgtaaaaataatatataataaaagaaaatatgttaaaaactgagcaatgctattgggtacaaatagcataaacacaaaaccaaacgactagaaacgtgacttaatattatttttaaaaaatatatatattaattaacttttttcataaatataaaataggttttggtagaaatcacagttgatgcaaaaccaattcgtacaagacagcattttcctttaaaaaaattgtgtatatttgcctcagccacacgaaagcctaattaataagttatctcattttggaagtacgttgtatctacatgtgaacgtatttaaatgtaactaaatccatgtttaatgaaactttcggcgttgatctgacacatggttttattttaattttttttcgtttggatccatgagattgaggtgtgggtgcactttttttggtttgtgttttattatcattgttataagatcacacagacgcacgtacggagaggagagatatagaagtagttgcaattgcaaagaaggccgtgtcccaatttccctttgaaagcacaaatttaatgatgaaaggaagagaagaaataaaagtatgtttacgggtgttagggtttagttagatgtggaaggggtggagttatgaaaattaataccaagttaagtgagcgttgagtgacgtgaagtcttacattaatacctctcatctgccccgttcagaccttagggtcccttggcctttaaaacctcaccacccctacactgagttattatcattcaagcaccattcttctcgatcttctctttctcaaccgaaccaaattacagatttaacaag

SEQ ID NO: 83 - DNA, 3000 bp, Glycine max
  source 1..3000: mol_type = unassigned DNA
gagtatttattgagagaatacttgcgagattctttttaatatgttatttactaattattattatttaaaatttattagaaatattttttaaatctcatttcttctattaattttaatcaataaaaaagaaaaaatatattaaaaagtatgctacatatctcatttgttaaaataagagtttattaacttaggagagttttcataagttcacaatttaatttgattctgaataaaaaaaaaagcttatagaatatttgtataactaattaagtctaaataaattttacataaattgtttcaaaccctctaatatatgcactagctcctaactatcttttattatatttaattgcaattttaatgaaatcctcttttgtttcagaagcttatagaataattattttcatttaataaatggtttttatgattctgatgtaatattttaattattttctctctctctctctctctctccctatatatatatatatatatatatatatatatatatatatatatatatatatatatatatatatatatatatattctcctaacaaacctttaaggatttatccaccgctgcatatgccaggctgaaaaacaattatttcattttcgtgggtgtatatataaaaaaaacttgtggaataagagaggtgttgatcgatgagctgtaataaccttcaatcttgagcttcaaacaaactcaagttatggtcttccctatagctagctaatattttttggtgttgatagctagctaatattttggactgcactgtttacactcaacagttcaatttacaccaacttaaccaacaaatcttccttcgattttctgctgcccattgaaactctgcatgtcaaaatgctacttgtcacaaataaaaaaggttgagaaaaaggataataagggaataacaacaatatatacaacatgagcatccgtttactatacgctgcttaatgtcatgcacagtacttatctaagcaaatttttttgacaagatgtgaatgatgtaacaataaacatttcatctctttctataatatatacttagttaggttattatattcgtacaatcagcttctgtatcattttatttccactctcttttttatcttgttttttttcatttctcatcatatttaccaattttttgataaaaaataaccatatttaccgatttttctctctttaatttatttttattttttttatccctctatgtttatctttcttgcacagttgcacttgtaaataatacccttataacttttttcctatatactttcgcaattataatacgcggtttgtctgtccgttgactgttgctatatgtagtatatagcagtacttatttatttattttatcagtacagtacttatttatttcagtgtacgaaagcggttgtttttattttcagatttaaatttgaattcaacctcgtcataatccccaatccaagaacaaagacaaaatttagaagggtacggagaacttaaagtctcacaaatccttttttaattccggatatccacaaattaaccggaagtaggactaattcctgaaaatattaaaatgtatttagtttagggaattaattttttctataaatatttttaatttaatacatatagatgtcgaaattatattaaacctctaattacaaacatataatgatattgagatatacatgattgatcaggagttaaaaatataaaaacaaaaaaagtgaatgaagaaaaaaaaaagaaaataaattgtgagtttaaatttttccagtgatattttaaaaaaataataataaattaatatttatcgtcgataatattagtatctcttactccccttgctctataggctcgaacttattatgattgatggttgtcattcatatgttccactaataaaaggagtaagattgacaaatgaataactagttaaggtgagtgcattaaatcagtaagatacaatactcgttataaattattaaatgaacgaatagtcaatgcttgactgttgacaacctttgaatagtcaatgttatctatttatccttagatggactttggcaacattgatgttaatccagagtggaatgtaaagttttaacgcatagcatgtctaaaatgatatgtatgtagtgtagaatctttatatgtgttatttttttttataaagatgaataatcaataataaagtttatgactgttttccattgatgttatgataaaattaaataaataaatccaaggcaatcacttcaaagacgttataattagacaatatcagcttcttcttctttttttctaaaaatgataaggataaataagtatgaattaatcataacagcacatctttttgtactaaaagatgattcattttaaaaaggtaagcattacgttacgaataaatttgttttcatgatattttgtttgtatgcaacatatttttcaatacaaaaatatttttatataattcaaactaaacataattttaaaattattttttagctaacacaataaaatttatataattaatttaaaaaataattgtgaacaaaataaatcagtaaataattttttcattataagatagcctaaaattattttttataagatttgtgtaaaaataatatataataaaagaaaatatgttaaaaactgagcaatgctattgggtacaaatagcataaacacaaaaccaaacgactagaaacgtgacttaatattatttttaaaaaatatatatattaattaacttttttcataaatataaaataggttttggtagaaatcacagttgatgcaaaaccaattcgtacaagacagcattttcctttaaaaaaattgtgtatatttgcctcagccacacgaaagcctaattaataagttatctcattttggaagtacgttgtatctacatgtgaacgtatttaaatgtaactaaatccatgtttaatgaaactttcggcgttgatctgacacatggt

SEQ ID NO: 84 - DNA, 3138 bp, Populus trichocarpa
  source 1..3138: mol_type = unassigned DNA
aaaaaggaaattaactaatattatatatatagtgaattcttaaaaatacgtccctcaatatgataaacattgttatatcgatcgggaaatatagttttagtgttcctagtatttttaaaaagaggtgccttcgtccaactaatcaaaatacgagagtcaaactatgagagttacatataatttggtgtcagagtagaatggcatgaagttatggctgctaaactttagctgactgtctgtttcatagcctaatttagccaacacctcaagttcctctctcctgatggcatctgctgctatctctatcctcatagcttttaacccatatcacatgttttcaaggtaccagagaggcggtggcttgatctaagaaatttaatcttaccggtaatttgcaatttatttgcatagttgatttcaattaatattgatgtcatactataaccggacttactaaatatattaccagggtctaaaatgcataccaccatcaccaggaccggaattaagggccggctcctgcaatgaaattttttccagtatttttcatttaataaattagatttttagttttaaaaataaaaaataattttttttaatttgaccagctcaaaataaaattaatagcttcgccccttatcctcacctcgacatttgtctttgtaccagttaccaaagacatcacggcaggattcgaggctggtgaagagagaagattaaagaaaggtgtacctcaaggagggacgatgagtaaattaaatatatttattttggaatttttaaattcatgagcacacgaggcgcgacggctcttattaaatttttcgtacttaccatggagaaaaaaaaaacaaataaagtaataaatgtataagcgagacgtacctttttggttcctgcactacaactgtttttgaagcacaaaatattattttttttcctttcaacgtaaaacaccaattcctttaaaaggaaacaacttttcttcgaatataaaacaggggtttaaagcaacgcaactcgttgagattctttcaagtttgtgcagtgcagctcatgatggtagtcataacacaacagtcctggatccaactacatttataattaagttctctctttggttgaccagtgagaatcattgagaaatatcaaaacgagtttttaaaaaaatgaatatgaaaacaaatgctccgctttgacttttctttacttttccctgctttaatggataggggtatcaatttgtccagttgcagttgtggaagtaaaatacaattatgtaacattttagttgttttttaaaatgtttttaatttaaaaatatattaaaatattttttattttaaaaaaattatttttaatactaacatattacaaccagatacaaacatgaaaaatattcttaaacaattctttttaattttttaataaaatattatttgaaatacaatactgtaacattttagttgaaactctattttctctacaaggatgcatggatacttttttttttaactaattgagtgtataacagtaattataattttttaaaatattttttatttgaaaatatattaaaataatattttttattttttaataaattatctttgacatcattatattaaaacgatttaaaaaaataaaatttaataaatcagtgtttgaaatgcgtttaaatatctctttggcgcggtcagccatagctttccatgcattaaactacaggcgaggacatcagacgccagttgttatataatttttggacataaggtgacaaatcttaatttccccaccacatgcagtactattcttctttcctttcgatcttgtgctaattaactagtcacatgttttgcttaattaaattgaagtgtcaatttcattttcatgttaaattaatttgttgtcggttctatatataacaaaattatcccttctgtttgtaagtattgaattttttacaagatttatttatttaaatacaaattacttttatttgaaatcttttaattatatatattcctttgttattgaacatgaatccaacatagattcatgggaattaggtccacgagaatatattagcccctagctataaacgactgagaagatacattttactaacccccctctcctctagtggatgcgatcaggttcaagtaaaactgattacagtgatacaatttcaaatgcttctggatctttctcccctttcactcataattaatttttctaatccctcctttttcttattataaaatgtatatgtcatcaaatttgaaaatatgcatataccaaacatcattaaaaataactattttattttgtaatcattcctttgttgattttttagctcaaaacaaacaaattctaaacgtgattactacgattcaacttcaatacagatgttacttgaaattctgctagattacttaattaatagtttctagctaaattatccatatatatctcttgatttataatttctgattaataaaaacagtgatcatttgatttggagcacacaataacaaatatgctattgatgagtgaaaaaaaatagccgagagaaatataaacaaagttattaaatttggttctatttagaactccactagagattcaagtcaatcaaaaaaatgttattttaatttaataaaaataaaactaaattttaatcagttcattaattaattcattgaattactcatttgattagttgcaatctcaccaagttttttttttaaaatccgacacagcaataacaaaggatattggacagggaagggtactccgaacccgtacctggtaggatgtctagttacacccggagagaaaagaaaagaaaaggccagaaaaaattaatagatatattttttttttttggtgtaagaaaattaatagagttaagtgggcgttgagcgcctcattaatcttctcatctgcctccatcattgcccacggccccgtgcctttatatctcccatcctcccgcctccccccctcacctaatatcatcaactctctttctctcaagcaacaaccatacactcatctcttctcgtctccctctctctccccctcagtacactacattcctcaacatttcttcttcttcttcttcttggcaaaata

SEQ ID NO: 85 - DNA, 3000 bp, Populus trichocarpa
  source 1..3000: mol_type = unassigned DNA
aaaaaggaaattaactaatattatatatatagtgaattcttaaaaatacgtccctcaatatgataaacattgttatatcgatcgggaaatatagttttagtgttcctagtatttttaaaaagaggtgccttcgtccaactaatcaaaatacgagagtcaaactatgagagttacatataatttggtgtcagagtagaatggcatgaagttatggctgctaaactttagctgactgtctgtttcatagcctaatttagccaacacctcaagttcctctctcctgatggcatctgctgctatctctatcctcatagcttttaacccatatcacatgttttcaaggtaccagagaggcggtggcttgatctaagaaatttaatcttaccggtaatttgcaatttatttgcatagttgatttcaattaatattgatgtcatactataaccggacttactaaatatattaccagggtctaaaatgcataccaccatcaccaggaccggaattaagggccggctcctgcaatgaaattttttccagtatttttcatttaataaattagatttttagttttaaaaataaaaaataattttttttaatttgaccagctcaaaataaaattaatagcttcgccccttatcctcacctcgacatttgtctttgtaccagttaccaaagacatcacggcaggattcgaggctggtgaagagagaagattaaagaaaggtgtacctcaaggagggacgatgagtaaattaaatatatttattttggaatttttaaattcatgagcacacgaggcgcgacggctcttattaaatttttcgtacttaccatggagaaaaaaaaaacaaataaagtaataaatgtataagcgagacgtacctttttggttcctgcactacaactgtttttgaagcacaaaatattattttttttcctttcaacgtaaaacaccaattcctttaaaaggaaacaacttttcttcgaatataaaacaggggtttaaagcaacgcaactcgttgagattctttcaagtttgtgcagtgcagctcatgatggtagtcataacacaacagtcctggatccaactacatttataattaagttctctctttggttgaccagtgagaatcattgagaaatatcaaaacgagtttttaaaaaaatgaatatgaaaacaaatgctccgctttgacttttctttacttttccctgctttaatggataggggtatcaatttgtccagttgcagttgtggaagtaaaatacaattatgtaacattttagttgttttttaaaatgtttttaatttaaaaatatattaaaatattttttattttaaaaaaattatttttaatactaacatattacaaccagatacaaacatgaaaaatattcttaaacaattctttttaattttttaataaaatattatttgaaatacaatactgtaacattttagttgaaactctattttctctacaaggatgcatggatacttttttttttaactaattgagtgtataacagtaattataattttttaaaatattttttatttgaaaatatattaaaataatattttttattttttaataaattatctttgacatcattatattaaaacgatttaaaaaaataaaatttaataaatcagtgtttgaaatgcgtttaaatatctctttggcgcggtcagccatagctttccatgcattaaactacaggcgaggacatcagacgccagttgttatataatttttggacataaggtgacaaatcttaatttccccaccacatgcagtactattcttctttcctttcgatcttgtgctaattaactagtcacatgttttgcttaattaaattgaagtgtcaatttcattttcatgttaaattaatttgttgtcggttctatatataacaaaattatcccttctgtttgtaagtattgaattttttacaagatttatttatttaaatacaaattacttttatttgaaatcttttaattatatatattcctttgttattgaacatgaatccaacatagattcatgggaattaggtccacgagaatatattagcccctagctataaacgactgagaagatacattttactaacccccctctcctctagtggatgcgatcaggttcaagtaaaactgattacagtgatacaatttcaaatgcttctggatctttctcccctttcactcataattaatttttctaatccctcctttttcttattataaaatgtatatgtcatcaaatttgaaaatatgcatataccaaacatcattaaaaataactattttattttgtaatcattcctttgttgattttttagctcaaaacaaacaaattctaaacgtgattactacgattcaacttcaatacagatgttacttgaaattctgctagattacttaattaatagtttctagctaaattatccatatatatctcttgatttataatttctgattaataaaaacagtgatcatttgatttggagcacacaataacaaatatgctattgatgagtgaaaaaaaatagccgagagaaatataaacaaagttattaaatttggttctatttagaactccactagagattcaagtcaatcaaaaaaatgttattttaatttaataaaaataaaactaaattttaatcagttcattaattaattcattgaattactcatttgattagttgcaatctcaccaagttttttttttaaaatccgacacagcaataacaaaggatattggacagggaagggtactccgaacccgtacctggtaggatgtctagttacacccggagagaaaagaaaagaaaaggccagaaaaaattaatagatatattttttttttttggtgtaagaaaattaatagagttaagtgggcgttgagcgcctcattaatcttctcatctgcctccatcattgcccacggccccgtgcctttatatctcccatcctcccgcct

SEQ ID NO: 86 - DNA, 2556 bp, Vitus vinifera
  source 1..2556: mol_type = unassigned DNA
tttttaaaataattatttcaaaaaatatcaacagtgcaattattttttataataaaatttaacatatcatataaaaagctttctttttttaataaaaaattattaattagaaaattattttctgttttgaaattaaaaaaaataaaaaataaaaaaattccagaagagttttgaaacaggaccacatgttaaaggtaggtgcttaaattaaaaattgaatatgatatcgacggtggcagcaggtggagtctgagtgtgagtggggatggccgttggccacataaaattctcagagagttaggtttggttcccatgaaatgaaagtggcctttccatttaacattctacaaggtgtctccatttgcctttgccaccattaaatttagggtttctgggttcatcttctgtccatttcagatgaatgcactctcctctctcccccgtatatcccctctgcacttccatcttaaatgccatattttgtggttcaaaacttgacccccattcatactccaccttcatgtcttgatgctttcttatttttgcactccaaaagaagggaaaaaagagagaagtatgaaacaaaaacgaggcataacatgatcacttcattatataattacccatcaaatatatatttactaaaattacaaatgtcaataacaaaatattagatcgataactgttttcaaaaacagtttttgaaaatagtctttaaaaattattatttcatgtttttataaaataaaattttatttaaaaacttaaaatgtttttaacttgtttttagtatctttaaatatattttaaaaataatttttatatgcctttgtcatttcattttgatgttaatttttatatttgaaaattgttttaattattaattttaatttaatgaaagctcagcccaatctaaaccagcaagatggttgatgatagataataattaataatatataccccaaatcagaataaatctgctagccgttaccctcaaatatttgaagtatccctatacattttggtgatgcaacttgttgtgttgattaggtttttagtatacatggtttaagagaaacaatccttaattagtttatactaaatgatgttatagacactaagtccaccttatgttagaagtactagttttagattagcttaactcaaatgttttatttcaaaagattagagtatgattaagaatgttttttgaaaaactattttataaaatagtttttttaaatagaattttatttgagaatttgaaatatactccgacttgtttttatgtatttttaaatattttttaaaattaatttttatttattatgctttatttttcatcattttttgtatttgtattgttaaaacaatttctagaacaagtaaaaataattaaaatatgtcatttaaaatcattatattttcacaataagttttccaaatattatttttattaaaaaataaaaataataattttttgctcgtaagtacatttgtttttgtgttttttttttcttcaaagaactctttatcatagtatcatgtaagaggtatcattacgttttttttccaagcactcaatgctaacaataccaaaatgtttactaaaaatgtaattttatttgttttttgttttaaaaaatagaaaattattttaaaaagtaattacaaaaaacctatttgacaactatttttaaaaacaattctgaaacttatttttgtataacaaaactctataatatttttaatattcttatatatgttttaaaaataatttttatatctagtatttaaaacaattctaaaaataataataaaaaaaaattaaaattttttttattttttgcttttaataataaaaaacaaaaaataatttttaatggtttagtttgtttttattatgaataatagaaaattattttaaaaaccaattctcagtacaaaatggcccggaatgttcggattgcgttgtacaaaacccatgatacaatcactttctagtttgtagaggtgggatgaggctattaattgcttgggagtgtcattgaaaggatggatcttggcttatgaaatttcaccactttggaagaaaaacaatgaactgatgaattaatttaagtcccaaatcaattaattaaggatgaatattttgaatttacaaggaagggtgctatttttttattagaccaaagtagaaaaatgaacaaataacagtaacccattaaagaggggcatcatgaatatgaaaatgaaaatgaaagagaaaaagagaaacaaggggggagtttagttgattaataatgagggaggttaggaaataaagtgtaggtgagtccaggtgggggagcgttgcgtgagtgtgagctgttcattaaatcctctcatctgccctctatttaattcccactattttagctttgcctttaaatcccacctcaccctcccattttctccctaccactctcttttctctcttctttcatcaacatcatcagctctttctctttctctctttctgtctttctccctcaattcttaattctcactcccaaa

SEQ ID NO: 87 - DNA, 2500 bp, Vitus vinifera
  source 1..2500: mol_type = unassigned DNA
tttttaaaataattatttcaaaaaatatcaacagtgcaattattttttataataaaatttaacatatcatataaaaagctttctttttttaataaaaaattattaattagaaaattattttctgttttgaaattaaaaaaaataaaaaataaaaaaattccagaagagttttgaaacaggaccacatgttaaaggtaggtgcttaaattaaaaattgaatatgatatcgacggtggcagcaggtggagtctgagtgtgagtggggatggccgttggccacataaaattctcagagagttaggtttggttcccatgaaatgaaagtggcctttccatttaacattctacaaggtgtctccatttgcctttgccaccattaaatttagggtttctgggttcatcttctgtccatttcagatgaatgcactctcctctctcccccgtatatcccctctgcacttccatcttaaatgccatattttgtggttcaaaacttgacccccattcatactccaccttcatgtcttgatgctttcttatttttgcactccaaaagaagggaaaaaagagagaagtatgaaacaaaaacgaggcataacatgatcacttcattatataattacccatcaaatatatatttactaaaattacaaatgtcaataacaaaatattagatcgataactgttttcaaaaacagtttttgaaaatagtctttaaaaattattatttcatgtttttataaaataaaattttatttaaaaacttaaaatgtttttaacttgtttttagtatctttaaatatattttaaaaataatttttatatgcctttgtcatttcattttgatgttaatttttatatttgaaaattgttttaattattaattttaatttaatgaaagctcagcccaatctaaaccagcaagatggttgatgatagataataattaataatatataccccaaatcagaataaatctgctagccgttaccctcaaatatttgaagtatccctatacattttggtgatgcaacttgttgtgttgattaggtttttagtatacatggtttaagagaaacaatccttaattagtttatactaaatgatgttatagacactaagtccaccttatgttagaagtactagttttagattagcttaactcaaatgttttatttcaaaagattagagtatgattaagaatgttttttgaaaaactattttataaaatagtttttttaaatagaattttatttgagaatttgaaatatactccgacttgtttttatgtatttttaaatattttttaaaattaatttttatttattatgctttatttttcatcattttttgtatttgtattgttaaaacaatttctagaacaagtaaaaataattaaaatatgtcatttaaaatcattatattttcacaataagttttccaaatattatttttattaaaaaataaaaataataattttttgctcgtaagtacatttgtttttgtgttttttttttcttcaaagaactctttatcatagtatcatgtaagaggtatcattacgttttttttccaagcactcaatgctaacaataccaaaatgtttactaaaaatgtaattttatttgttttttgttttaaaaaatagaaaattattttaaaaagtaattacaaaaaacctatttgacaactatttttaaaaacaattctgaaacttatttttgtataacaaaactctataatatttttaatattcttatatatgttttaaaaataatttttatatctagtatttaaaacaattctaaaaataataataaaaaaaaattaaaattttttttattttttgcttttaataataaaaaacaaaaaataatttttaatggtttagtttgtttttattatgaataatagaaaattattttaaaaaccaattctcagtacaaaatggcccggaatgttcggattgcgttgtacaaaacccatgatacaatcactttctagtttgtagaggtgggatgaggctattaattgcttgggagtgtcattgaaaggatggatcttggcttatgaaatttcaccactttggaagaaaaacaatgaactgatgaattaatttaagtcccaaatcaattaattaaggatgaatattttgaatttacaaggaagggtgctatttttttattagaccaaagtagaaaaatgaacaaataacagtaacccattaaagaggggcatcatgaatatgaaaatgaaaatgaaagagaaaaagagaaacaaggggggagtttagttgattaataatgagggaggttaggaaataaagtgtaggtgagtccaggtgggggagcgttgcgtgagtgtgagctgttcattaaatcctctcatctgccctctatttaattcccactattttagctttgcctttaaatcccacctcaccctcccattttctccctaccactctcttttctctcttctttcatcaacatcatcagct

SEQ ID NO: 88 - DNA, 3000 bp, Sorghum bicolor
  source 1..3000: mol_type = unassigned DNA
tatccccttgatgacgacgagcgttgagcgtgcgtggcagtgattgtctgattgactgatcgagcaagtgtgtatagtagccaactctctctgcatgtggtggcttgcaggacgcacacaactattatagaggccggccgcgcatatatataggtatataggatcagtcaatcagacaatcactaaagatacattgacatgtttgtgtttttcctagaaaatcatttcaaaattttcaaaggaaagccttttaagacaaactagaagttatttattttgatctatatgtatttttactcctacataagaggctacctttatcttccacataaaattttagaagataactttgacatcatggacaagttcgaatagacccatgacggctaatgtgtgatgtgagtctcaccttgggtcttgagagttggttagaccaacatactcccttcatcctaatctataagtcactctaagaatcttgtcaaaacatctcaagtaactaacattatagaaaaaatcaaaaagatttatgacatcaaataaatattactataaaaatataactaatgaagaatctaatgatacttagatgatatcataaatgttattatgttatcatataaatttggtcaaacttaagatacttttgactttctaagattcttggaatgacttataatttaggatggaaggagtatacggcttctagagtccttatcatcaacaccatgctagaccttttacgtgaggggaggatgaaagcataagtgggttgataggactgtggttcgcttagtgtatggtgtgaacccgatagactctagaaacttgtgtatcaatggtcaattatgagtagaaggttccatcggaacaattattatttatttcaagctatttcggctctttcttaatcttcaaaaagaaattaattccgtaatggtaagacgaaaaaagaaaaaaaaataaaaaggaagtgtggaaaaatgacaaaatggcggcacagggaggcgagaaccaccgcttttaggaaataagcctacaatttgattctcgtctcgttttacttgcattttctttcgttcagtctcgttctgagagtggaatcgaaccactcactccgtttggatttagagtccaaagggcccagccagcgaaagaggattgacctccgtggacatgtggtgcatggtacgtgttggcccaatcaatgtagcttgtgacatggcactgcgccattactagatgcatgcacgtgtgtttcaagagggaacattttttgtgaaatgtggttgtattcacatcaatccatgtgtattagggtggattgaagtggaagttgaactaaattttacctcaatccaccgcaacccatgtggattgaggcgaatccaacaacattcaaataaggccttacttggttatgggtgtgttggggagacgttgacatgaggccctttgagatggttgcaacctgggtcaatttaacttaggccatggtggatcatgtgtatgttgaggtgagatcgtgcaggtttggtctcaccttgatcactgagggtggatatagcacatataatgtttttaatctacatcattaactctaggttggcccttttatgtaaagcaaggatgaaagcataaataggttagtgaaagtgtgcgcttaactaagagtgtagagtggatctgagatattgaactctaagcactaaataaccaagttttaacttatgtcaatgttaatttgttagtataaacaataagaatataataagcatataaatattgtaatacaacttaccaccaataactttagtactctactgcaaagtataaagacgttttggcttttctagatatatagtttggttgtgcacttacatatattttatgtctagatatatacatattagaatgtatctagaaaagacaaactatcttacaatttagagtgaagagagtatatatagagatgtaatgatcatcttgcatcattgaaatactatatgacatcaaattattacaaaaacaaaaatatcattggttgaagcttgttgaagatcataaattattatttttgagccctcataaggtacaactgccgtttctaaacatatgcacaaacacaaacactcacgcacgcatacaacacacacccagtgtgcacgacctacaaactatacacacgtagatacgaaccatgttacggtcgacgcggacatgaactgggccttcatgaggggcagcactagatatcactgagtgatctcactgagtccaccccttccccctcctcctgatggcatccttggaccggaaaccatgtcagggctctccgatctttgcttcaaccatggcgtcaagtttgaagcactcgtctcacagcgttttggatgcccagtgagtcccatctctccccagactgttttggatctttgcttcaaccatggcgtcaagttttggatctctccccagcattttggatgcccggtccgctgtccgtctgaatattgattcagtgagtctcatccttcaagcttgctttggtggcaaagaatacaatgttacccatctctctggatggatgttcaaattttcaatatcttgcaaaaatgtggctttcatgattaacaaccttaaaagccactctttcaaaacttttctcatcttctttcacctttggagtggaggaggaccaaattggcgcaaggattttactctctggcaacaggagcaagatgcaaaatggaaccttgttggatccaagtccaagaaatcttatgctgatattgctaaatcaaatatcaaaaaatcagttttgttgcgcttatcttaccccaccaattatgcatccaacttcctggagccccctcgcagagcatctttggctcctgacaggttctcccatcgccctgctcaaaataatgtgatgaaagcacaaattgatagtaaacctgtcaaaggtttgcaacaatctcatcctagtggctttccaagatg

SEQ ID NO: 89 - DNA, 3070 bp, Zea mays
  source 1..3070: mol_type = unassigned DNA
cgggcggagcggagttcgccgtcttccggggcctagcccaagtccgagccctgggtcgggcggaacggagttcgccgtcttccggggcttagcccgagtccgagccctgggtcgggcggagcggagttcgccgtcttccggggcttagcccgagtccgagccctgggtcgggcggaacgaagttcgccgtcttccggggcttagcccgagtccgagccctgagtcgggcggagcggagtttcctatggcgcctttggcaaggcctgactgcctgtcagactcactctgtcgagtggcactgcagtcggagtggcgcaggcggcgctgtccttctgtcagaccggtcagtggagcagcgaagtgacggcggtcacttcggctctgccggggggcgcgcgtcaggataaaggtgtcaggccacctttgcgttaaatgctcctgcgactcggtcggtcggtgcggcgatttagtcatggttgcttctcagcgaaggcaaggcctcgggcgagccggagatatgtccgccgttaaaggggggtctcgggcgagacggaaatctctcggggtcggctgcccttgtccgaggctaggctcgggcgaggcgtgatcaagtcgctcgtatggactgatccctgacttaatcgcacccatcaggcctctgcagctttatgctgatgggggttaccagctgagaattaggcgtcttgagggtacccctaattatggtccccgacaataagtatcactgagattattaaattatatttttggattgagggagtagtatttaaagaagagccttgcatgcaatttcttttgtttgaataatgttttcaacttaaatacttttttttgcatgtgtaacatttattctccataatatttttccatgtatctaacttataaatcattttcataaaccaatgtcaaagatgaatccatgtttcttacttggaaaccccgaacaaacaccactagcacgaggcgctcgcgttagcgtcgctcaccgacgacgagaagaaacttggcgactgtcagttcgaactctggaagcagtcctacatggcccatgcgccgctgtgtacggcaagctccggcgcagctgccgcttggacgtggtccagagcggctgcaccgcgctgtccatcgtcaaacatggggacctcatggtcgtcgccaatgtcgacgactctcgggttgttctgggcatcgcaacctacgacgacgccatcacgccgtctagctcatcatccacctgaagcctaacctgccacgtaagtcgctactgaccgaccatgaattcttgtgcgctggaatgatgaccattgttgttgttgtgtgagtgtcctcgaacaagatgtatgtagaggagtagcacatccggtggtgcaacgaccaggtgtactacctcgctgatgagcccggggtgcacttcatttggcagcccagccaagagtgatcggtactcaccatatcgcgcgcgttcgacgactattatatcaaggattgtggcgtcatctcgacaccggaggtgagcagaggtggaccgacaacaatgaccactcgccatcgtcggggtaccttttgtgtcggcctgcctttaattctcttcgcaaacacacacttgtattttttgtttaagcaagcgtgtatggtggtgcgtgcctgatgactaacgatgtacgacggaacttctaccggcaggtgtggcacgtgctctccaataatgagaccatgcaaatcatgacatatatcgaagtgtgcatgatactgatagttgcaatgtagtagtgaaacaactaaattaaaataacaaaatttatgtatggctaggatcacaaatgaattatgaaatattttcttataacaatataagacacattttgtatataagttatcatggtattatatgttcccgttgcaacgcacgggtactgacctattgttcattaaggatctttaatagatgttttttgttattttctcgaacctaaatgttcgtcgaccaaacttgttttgtatcagtgtataatattattgtcactgttttttatgtcgcggactatgttttttgtacgtcattgaaactacctataaaattgtcactgtgtatcagcgtatgtgtatgcagttggcttgatgtgagacaataagctgaacccacggggttttcatggttttccacccaattacgagttggtttgcggtcaataatattattggatgggttgggtttattttttttcttatattttagggtgggtgtgggataaatatcaaagttattatacttgggtatgaatgggagtgagttggattttttgccattagcaggcctacatggcggcaaacacacccccatgtctttatccccatttcatacaagtcaggtaattaacgagtatccgctgacatgagactgttttgagttttgacgctttcataccggcctgatgatgataccttggcagttggcaaacggcccatcgatgtccgccattaactgccgatccaatccaagtaaccgtaggtatctttctgaccatagtccacaagtccaaaccagccgtcaaaccaaccgatcatggacatccgatgggcatgcttgttgcgcgatcaaaagtcatcatacaaaaaatgtgatgaataaaaactggacaaaatttgtgccatcgaatggagcatacagtcgtggggggcctgctacaagaccaggcgccaaccccctgcctctgggctctggttggtggcggtagccgggctctcatttaaactacccatctgcccccgattcttttaattacgggcgaccctcgcggctccgcccctattttaagaccccaccacggcaccacctcctccgcaaacaacacacgaacaccgcaccgcaacgtagccggctaggggaagagctctttccttcagctgtgccgtgcacaacgcacggcacgctggtttggtttgcatcgcccccgccaagacgctgccgtgagcaggcagagcgggtgggaagactggtgggcgagccggccgcgccgagggatagcagcagcagcagcaggcgggcgac

SEQ ID NO: 90 - DNA, 2719 bp, Setaria italica
  source 1..2719: mol_type = unassigned DNA
aaagcaaagattcatgcctgagctgttggtgacgctatcagctttggctcacctaaaagcagcgccggccacagctggggttcgtttcgtctactctgattctcttctgaagtctgaagtccaaaccatggccaaagtgactgttgacgcaggcacgtaaatattcaattgtcacagtgcggtttggacaccacgtagacaaacgtttcctggtcctgagcttttgattggcccatttcagactagtacgttaatgcttgcactggcccgaagcggaccacattgctactgtgtgtttatctgctccgagaaattgggagatagggtggttagtacagatgagcagctgttcgctttctccatctatcattcttcagcacctgcacttccaaaaagctttgaatttggcttaggtcatggaacggcttttgtcaggatctcaacgttctcctttatttgcgagctcaactccttcctcatagctaactcttcgttcagtcctccagcattgccctctgaagtctgaaccactccatttctatattgtacaaggaaaaggagtgctatatcagggttgcatttccaaatctgcaaagcacgcgtacttgaagccatcaaaagatgactggccagcaggagcagcttgccagtgacacagatttcgtccaaacggagcacgcagcgcatcgtgctacagcgaatcgatcggatcgagctgaggccaagcattcaaggttttgcaggtgcattgtgatgccgacccgacacacgcgactgctgcagtggctccatctataaatctgtcctatataccagcacgcgtgaacagacaaaaaaaaacatcaacaacaagaagagaagttttactgctgcttccagaaaccagcctgatcatgagtttttggctttgagaacgagctgaggatggttttccagggcaggtgaacgacatctcgccatttctcaatcctctaacctctccagatgaggggaaacagttcagtgctttgcctgtgcattgtgcgagaatcgggcgggagcgttcatcttgatccagcacagcagggctttaattgtgcaagcagaaggtaccagtaccagcagaggattgatttgcacatgtggaagctctgaagccgttgctatcgcatcgttctgacccggtttggtggcacgagcaaggtagccaaatcaggccagccattgcatgtgttgccgtacatgcacaagaaagtttaaccgcagtcatatgaagtactactgacccggatgtactacatgactgcagactgtgatgcttgctagaggtaaaaggacacggagggcaggagtcctgccagttccctcaatgctctgtgctccgatctctctagaagggacccccttctttttatttttgaaactatagaaagacaaatttcccttccccttattagattgtactaagtactattttgattacttgtttttatgaattgtgcagaggctgagaggcctgatccaactttgggtgcggccacaatgtgtgggaaatatgcgctgtgttcatctgcacctctctgccccctttatctcaagcaaacgtctgtaccttgattatgtacttggtatgattggtgtgagattcagatgcaacgattacttcatatgagccttgctcatcaccgattttccctcccttctctcgtgcctttttccttttcccaaaccactgaagctcaaccagtccgcatcagttcactactcccgctagcatggcaacggcatgatcatgaaggattccaacaaatggcctggcagctgatggaattcgactgctctctctgaaatttagctactccttttttcatcaattgagttttgacgataacaatttggagtggcgcaattcacaaccacaaccaacacttgtctccctctccctggacggaacagtgcggccttgctaatgctaccaacaacacggtgcgcggtcgtacccttggccgttggcaaatggccgatcgacatcgccattaactgccggtccaagctgcgccaggcaagccgcgaaagccgtagagtaccttcccgttcctgcccaccaacggcttcctccgcgcaccgggacgacaacctgatcgacccatccccaccacttgatcgtcgcacaccgatcctcgcgtgcgctacagttcgtcacgcacccgtacgttcaaccgtcgtctcctcacccctcgctaaatcctcgctgttttcccgaaattgcttaccaaaaccccgtgcgcgcgcgtgcccgaagctgcagtgctgcaggcggatgcgagcgccggagcaccggagccggaggcaggcaggcccccgcccccagtggccaacccctaactcctccggttggtggcggtagccgggctctcatttaaactacccatctgccccggatttaattacgggcgccccctttcccggctcgcccactatattaagaccccaccacggcaccacgtctcctccgcaaacaaacaccccaactcgccaggccaacgtacccccacacaaaacaccgcgacgcagcgccccggttctccctagcttcccactgcgcccaacgcacggcacgcggttgcagcagcgtccgcgagttccctgcggagagcagaggccagaggcgagcggcagggagggagagtgatcgatcgactagtgaagtgagccgcgccgcgcgagggcggggggcgcc

SEQ ID NO: 91 - DNA, 2500 bp, Setaria italica
  source 1..2500: mol_type = unassigned DNA
aaagcaaagattcatgcctgagctgttggtgacgctatcagctttggctcacctaaaagcagcgccggccacagctggggttcgtttcgtctactctgattctcttctgaagtctgaagtccaaaccatggccaaagtgactgttgacgcaggcacgtaaatattcaattgtcacagtgcggtttggacaccacgtagacaaacgtttcctggtcctgagcttttgattggcccatttcagactagtacgttaatgcttgcactggcccgaagcggaccacattgctactgtgtgtttatctgctccgagaaattgggagatagggtggttagtacagatgagcagctgttcgctttctccatctatcattcttcagcacctgcacttccaaaaagctttgaatttggcttaggtcatggaacggcttttgtcaggatctcaacgttctcctttatttgcgagctcaactccttcctcatagctaactcttcgttcagtcctccagcattgccctctgaagtctgaaccactccatttctatattgtacaaggaaaaggagtgctatatcagggttgcatttccaaatctgcaaagcacgcgtacttgaagccatcaaaagatgactggccagcaggagcagcttgccagtgacacagatttcgtccaaacggagcacgcagcgcatcgtgctacagcgaatcgatcggatcgagctgaggccaagcattcaaggttttgcaggtgcattgtgatgccgacccgacacacgcgactgctgcagtggctccatctataaatctgtcctatataccagcacgcgtgaacagacaaaaaaaaacatcaacaacaagaagagaagttttactgctgcttccagaaaccagcctgatcatgagtttttggctttgagaacgagctgaggatggttttccagggcaggtgaacgacatctcgccatttctcaatcctctaacctctccagatgaggggaaacagttcagtgctttgcctgtgcattgtgcgagaatcgggcgggagcgttcatcttgatccagcacagcagggctttaattgtgcaagcagaaggtaccagtaccagcagaggattgatttgcacatgtggaagctctgaagccgttgctatcgcatcgttctgacccggtttggtggcacgagcaaggtagccaaatcaggccagccattgcatgtgttgccgtacatgcacaagaaagtttaaccgcagtcatatgaagtactactgacccggatgtactacatgactgcagactgtgatgcttgctagaggtaaaaggacacggagggcaggagtcctgccagttccctcaatgctctgtgctccgatctctctagaagggacccccttctttttatttttgaaactatagaaagacaaatttcccttccccttattagattgtactaagtactattttgattacttgtttttatgaattgtgcagaggctgagaggcctgatccaactttgggtgcggccacaatgtgtgggaaatatgcgctgtgttcatctgcacctctctgccccctttatctcaagcaaacgtctgtaccttgattatgtacttggtatgattggtgtgagattcagatgcaacgattacttcatatgagccttgctcatcaccgattttccctcccttctctcgtgcctttttccttttcccaaaccactgaagctcaaccagtccgcatcagttcactactcccgctagcatggcaacggcatgatcatgaaggattccaacaaatggcctggcagctgatggaattcgactgctctctctgaaatttagctactccttttttcatcaattgagttttgacgataacaatttggagtggcgcaattcacaaccacaaccaacacttgtctccctctccctggacggaacagtgcggccttgctaatgctaccaacaacacggtgcgcggtcgtacccttggccgttggcaaatggccgatcgacatcgccattaactgccggtccaagctgcgccaggcaagccgcgaaagccgtagagtaccttcccgttcctgcccaccaacggcttcctccgcgcaccgggacgacaacctgatcgacccatccccaccacttgatcgtcgcacaccgatcctcgcgtgcgctacagttcgtcacgcacccgtacgttcaaccgtcgtctcctcacccctcgctaaatcctcgctgttttcccgaaattgcttaccaaaaccccgtgcgcgcgcgtgcccgaagctgcagtgctgcaggcggatgcgagcgccggagcaccggagccggaggcaggcaggcccccgcccccagtggccaacccctaactcctccggttggtggcggtagccgggctctcatttaaactacccatctgccccggatttaattacgggcgccccctttcccggctcgcccactatattaagaccccaccacggcaccacgtctcctccgcaaaca

SEQ ID NO: 92 - DNA, 2754 bp, Oryza sativa
  source 1..2754: mol_type = unassigned DNA
ggcaggatgtactcacgtacagttagagcattaacttaggcaagcgtttttctttgcaggtaatggcctctgtcaaacctaatacagattggcagtttggcgcgatggacaggtcatgatcaattttaaataagcagatgatcacatttaatgtgtagtatgaagggaacaggtagaataatacttgtaagtttacaatcctgtcccacgaagatgtcgatcccctaagtgccgttcgtcgtagtacatgagggacaggtccaaaacgaagagacggaattcgctcgtgcgaaacaagggcaagagagacgtgaaccgaacaggattgcccttgcacacctgcggcggatgtatggttgcagctaagctttattaatgtgagtctctgcccttcctctggtcgatcgatgacgagcaaacacagcgcgtttcgccacgctttctcccaacccccaactccatcccatgtcggcccatcgtccattcgtcctccagaccgatcacatattcagacccgtcaacttcagcatttcacgcggccactacgacagctgcttcggctgcactttcactcgtatcagcgcgaggggaagaagaacaatccgtggttttccgtttcttcagaggcatggacagatcgtctcacgactcgtacgcgaagatgcttgatgcttcccggaggatcctgtctcgaattttgattggatcactgcgcactggacactcactactacgttaatgctgctgccagggctgcagccaaaggaccacactgtcattggctccgggacaataggaggccatatatttagccattttttagggagattttcaccaattgtacagttgcactattgctacgcagatcactgcatacgcaattaactctttcttacaagctcagaagctgtctgcacctatatagctactccctcctccgttctataaaaaaccaacctactatcggatgtgacacatcctaatactatgaatctggatatacatcatactaaaatatgttatatccggttctagattcgtttttatggaacggagggagtattctgtcatcagctatcactgctctgcctgaacttgtctgagctattactactgtagtatatgaatttatgaagtggagtctcgtaacaaaaatacgagtatactccgtactgtactacccttatcaggattcaaggatactaggagtatagcattaccagatcaggcacttagatgtggccatccaaagagtaatggtaatagcctaataggagtaccatctactattgatctttcaaaaaaaaaagtactagtatagaagtagtatccagctagagctgcttaacagggtcagaatttgtccaaacagagcttgtaatgcacactgacgaagtcgatccgatcgaatcagagtcaacatttaaagagtactatttcgaagtaaaactgttcagttcttacaagattacatgtgaatttgcaagacttggacatgagtgttcatctcgtagtttaatgatgggtacccaacctgcaacaacagtgctttaaattgtacaagcagagggtaccaacagagtaatttgcacatgcagtcctgaacctgatgccattgcgaaacacacaaccctatacggtgcagatgcaagggagcccaattcagtcccagccattatctgtattgccgtacttccgcagggaaagttaccctctcatctgatctaccattgcatacatctcaaaaggaagtgagtaaaaaagaaaacaggaccaatcttcagagataagtttttgaaacctatcttcagagataagttcactcggcgataggagaggacctgatttggactcaaatcaggtgttgacgaatagagtagcaagagttttttcgacgggtcaagacctcaagggtcttaacagttgaactaactcggttatgatttggacacttggtgattaactactgataatagtactacttattgttattggcttgttacatcattcggtgctcaaaaatcagatgcaaatttagatgggacagacagcagctactagcaacataagagaattatgttcagtgtatcatgcatgactaaactctgaacgtactcacctggatccagatgcgagcagtacagtacctgtgcacattgcttgtgtattactccacttaattacgaactctattattttcctccgataatgcccgcagaacaaggttgtcactgaaaaatggtcctctccagagtccaggagctataggaggagtatgatactccttagcaatcatatactcatatgacatatccaaattgacaccggggttaagccgttaaccgtcactacgagttgcacttgtataaacaaaaaacaagggagaaaaccttgtgtcccccccatgatgcagaaatctaataagagcagcccaacgcttccggttggtggcggtagaccggcctctttaaactaccccatccgccccagatttatcaattactcctcgtcatctcgtctcgtctccgccaccgtgcgcgcgtcccctatattagaccccccaaccgggcaccggacacaccatcaccaacacaccactgcaaacccatccgcctccgcaccgcatcgcacctacaaattgtgcacgctgcaccgctcaaaaaaaagaagaaactaaagtcgtacgtaggacgcggcgtgcgagcgttggtgcggtgcgcggcggcgcgcggggaagtagtgagagcatcgatc

SEQ ID NO: 93 - DNA, 2500 bp, Oryza sativa
  source 1..2500: mol_type = unassigned DNA
ggcaggatgtactcacgtacagttagagcattaacttaggcaagcgtttttctttgcaggtaatggcctctgtcaaacctaatacagattggcagtttggcgcgatggacaggtcatgatcaattttaaataagcagatgatcacatttaatgtgtagtatgaagggaacaggtagaataatacttgtaagtttacaatcctgtcccacgaagatgtcgatcccctaagtgccgttcgtcgtagtacatgagggacaggtccaaaacgaagagacggaattcgctcgtgcgaaacaagggcaagagagacgtgaaccgaacaggattgcccttgcacacctgcggcggatgtatggttgcagctaagctttattaatgtgagtctctgcccttcctctggtcgatcgatgacgagcaaacacagcgcgtttcgccacgctttctcccaacccccaactccatcccatgtcggcccatcgtccattcgtcctccagaccgatcacatattcagacccgtcaacttcagcatttcacgcggccactacgacagctgcttcggctgcactttcactcgtatcagcgcgaggggaagaagaacaatccgtggttttccgtttcttcagaggcatggacagatcgtctcacgactcgtacgcgaagatgcttgatgcttcccggaggatcctgtctcgaattttgattggatcactgcgcactggacactcactactacgttaatgctgctgccagggctgcagccaaaggaccacactgtcattggctccgggacaataggaggccatatatttagccattttttagggagattttcaccaattgtacagttgcactattgctacgcagatcactgcatacgcaattaactctttcttacaagctcagaagctgtctgcacctatatagctactccctcctccgttctataaaaaaccaacctactatcggatgtgacacatcctaatactatgaatctggatatacatcatactaaaatatgttatatccggttctagattcgtttttatggaacggagggagtattctgtcatcagctatcactgctctgcctgaacttgtctgagctattactactgtagtatatgaatttatgaagtggagtctcgtaacaaaaatacgagtatactccgtactgtactacccttatcaggattcaaggatactaggagtatagcattaccagatcaggcacttagatgtggccatccaaagagtaatggtaatagcctaataggagtaccatctactattgatctttcaaaaaaaaaagtactagtatagaagtagtatccagctagagctgcttaacagggtcagaatttgtccaaacagagcttgtaatgcacactgacgaagtcgatccgatcgaatcagagtcaacatttaaagagtactatttcgaagtaaaactgttcagttcttacaagattacatgtgaatttgcaagacttggacatgagtgttcatctcgtagtttaatgatgggtacccaacctgcaacaacagtgctttaaattgtacaagcagagggtaccaacagagtaatttgcacatgcagtcctgaacctgatgccattgcgaaacacacaaccctatacggtgcagatgcaagggagcccaattcagtcccagccattatctgtattgccgtacttccgcagggaaagttaccctctcatctgatctaccattgcatacatctcaaaaggaagtgagtaaaaaagaaaacaggaccaatcttcagagataagtttttgaaacctatcttcagagataagttcactcggcgataggagaggacctgatttggactcaaatcaggtgttgacgaatagagtagcaagagttttttcgacgggtcaagacctcaagggtcttaacagttgaactaactcggttatgatttggacacttggtgattaactactgataatagtactacttattgttattggcttgttacatcattcggtgctcaaaaatcagatgcaaatttagatgggacagacagcagctactagcaacataagagaattatgttcagtgtatcatgcatgactaaactctgaacgtactcacctggatccagatgcgagcagtacagtacctgtgcacattgcttgtgtattactccacttaattacgaactctattattttcctccgataatgcccgcagaacaaggttgtcactgaaaaatggtcctctccagagtccaggagctataggaggagtatgatactccttagcaatcatatactcatatgacatatccaaattgacaccggggttaagccgttaaccgtcactacgagttgcacttgtataaacaaaaaacaagggagaaaaccttgtgtcccccccatgatgcagaaatctaataagagcagcccaacgcttccggttggtggcggtagaccggcctctttaaactaccccatccgccccagatttatcaat

SEQ ID NO: 94 - DNA, 2000 bp, Glycine max
  source 1..2000: mol_type = unassigned DNA
tttaaatttgttgcagaatgatcataattaaatttccaaggcaataaaaatccctgtctacaaatttatttccataggggctttggatcgatggcgtggaccccacctgaaagtgacacccttggatctcacgggtttcagtgtcaaacctcatttaataagtcaccccatctcccacccttaatttccaccatccaattctccaatctccttcttcataaattaacggctgtgatctatttgaccctactactactttatgaccattctccattcggttacaaatcaatatttctctcactcccaaattaaaaaattgccaattaccaaacatgccatctctcaaaaagtacaaagtgttactattatttctatttaattagtatagtagtactctttctaataaatttaatattaaaatcacataattgtacgtactacttagtaattgagattcttcaaaataaagagaataactctcaggtaatttagtgaattctgaaagacaataaattgtgtttttgacaaatgttaatacaacaattttatacagtagtaatattttttatatcacaaaaactaaatataatttcatctgaataatctatttattttttaatgtaaatatttatcacttagattatcaagattacgatttttaaagaaaagattaacaagattacgaattgggttaagccaatttgtataagaaaattggatatcatatgcccatgaggtcttgggtcctgtccacaaggaaatttaactcatttttactctatatatacttctaacgtcatatattgcaacaataatatatgcgttactttgacgaaatttctactaacgttggcattgaagttgcttttagaagtacctatcaattttccacgatatttcagtcacattgaaacaacagttgaattcagaaaaaaaaaattaaaaaaattgaacttcaaatacttcacagtccaccttaaacatatcattcacattcatctaagataaaaatcaatcactaattttaattagataatagtattaatagaaacattaaaagccttatctttttataaagctgtttttcattttcatcacatccagcatcgatctcaatccaaactctttcttttcacaccctatgagtaactcaaacctgacatcatccaacacggcgcgtgtatcccactctcttccttggaagacgtaaggaggcaggaagcgcgtgggagaggaactgagaggaaaaaaaggtttgactttggtgaagggtgtgggaaacgtttagaatggccattaagaaagcaccacgtggagcgtaacagccgacgtagtaagtattgctgatcggtttctgtcaacccgcatttaccatttacagtaaatttattaaattaaattaaattaacccatttattacaacacactatgaattgaatgaatgaatatgagcattatatgaagagagagaggaacgtagaaaagaaaactaggataaggtaaaggactaaggagaaaaagaaagagaaagagagaaagggactctgtccccttttgtgtgcgtgtgttttgtcaactgagtgaactctcaagtgaactaacatcaccaaaaaaaccactctcttgcaacctcctcatcacattgctccttctggtattccatataacttattaactttgatttttttctctctttaattttttcttttcttccgatcatgtaacatgctaaaaaataatttgtaagattctggttggttggttttgtagggaatctttttctcttgtttttttctgggttgaatgagaataatgttttgatagtttaaagctttttatttgtttggtttctgatatgggaaagttttgttgtggggtgttagagacaggtttggctcaactgaagtaaggtttggttatcttattaccttatctctcaccacatttaaaaacacacaaaacacagttacacaagtgaagtgtggttttgggaagcaaga

SEQ ID NO: 95 - DNA, 2000 bp, Glycine max
  source 1..2000: mol_type = unassigned DNA
atgaattattatatatgctctatttgttaaattttttaaaataattattttaaaagttatacatagatttttttattggttaatagtataaaattttaactctcacaaaacaccatgcacgaaaattaaactcatgaacaatataaatatacttttttatctgaaataaacgagggaaaatatctcttatttgagaaaaaaaatttaaaaatatttttgttactactatgtcataagttaatatcttggaagtttaaagaatattaacttgttaaaataattcaatattttttttgtctgtaatgtgttagccagtattaacacaattaatttgtttttggtaataacaatgcttagatatggcaagaaaactcatacttgtgggtatccgtctgaattcgtttcgactttgacgggtaatacctgagttgacctggtataggttcgggtttggatttttctcgataatcaaaagtcagatacgggtatgggtatgaggttactagactcgtcccgaccccaaacccgaactcgccctgccacttaaaatctttaaatttttttgcataatttaatcaaaaggcataaaatttttattactagttaattttattttagaatttttacataatttaatattattttcttaactatttttgtagacacatgcgctataataaatttattaatatataagtagttaaaacaaatgtttaacaattaactttctttttctaaaatcaaacttttaatattttttttataaaaaaaaatatttttttaatttaaatcgtgtatgggacagggtcggggataccggataggtacaggaatgagaaaataaatttaaacccgatatcgaatacgaatatgaagatatattgagaagttagaataagagattgagagacaatactcataaccatcccactctccattgcaatgtctaacaatgcttacacatgcacaagcaatgactcagctcaggtaacattcatacattctattaacatgttggcgtcacaagcattattataatacacccaatttttcctattaaatgaaaaagacgacgtaccgtatgcccctccaattaaacacaaccgacatggagaaaatgatgatggttgattgcctacgaaaggtgacaattcgtgaaaacaatgatgatatatgcttgctaaaagagaaataccaataaaatgtttacacattatttattattaactgaacattatataaattgtaaagagtttaataaatatatattgttaagttgaaagtttttgcagcattgttgcttgcacttcttgtgcaacaattctgaccttatttatacattatcaatcaattgaaaatatacagtttattatagatgatgattttaaaatttaacaaatttattataaataatgatttattagacaatggtgtaaaaaacttttatattttactaaaaacatgtttttttaaaatgtatgatgctattattcacgtttctcattttttaacagtcggttgaagacttttagtttagctgcttcacactaccaaggccattccttccccactttgaacaattcacatttttattattttttgcagtacccatatttttcaagtgacagcctactaatcattcaaaggtgtaaaaaattgaatttttattgctatccagcaaccacttttttgtttttttttttgtacaaaatatatagataccatatgtgacatgcctataataaattaataactgaaggctgataaaataaaaggttaataactgaaggtagttttatctacttgtctctacgtcaagaagcacgtgaacacaactgaaaggtgccaacaaaacatgttggaaggttagctacataatcttcggtggagcaaatattccacttgtgcacatgcatgcatatataattggttatttgcaatgcctcattccatgcactgaaactagttgcgacacttgtattgcagtgcacataataacc

SEQ ID NO: 96 - DNA, 2000 bp, Glycine max
  source 1..2000: mol_type = unassigned DNA
acttcgatgttcttgcacttgttatagaattcatgtcataataagtgtgtgctcgaagtaaaaattaattttaattgttttttctatttatacttctaacattagcaatttgcataacaaacaagatttaatacaagattaattttgtaaaattgttactttttttatttattcttgctagaaaaagagaaagaacctttcacgaaaatcttcataatttcatttgaggttcacatatatctttggaagtggaggactacgatgcaacagtttatttattatttcagagaataaccattacccaaaatttctttgaccggagtagcttgtccatgaaataagacatggtggtaataaaaaaaaggattaattgaacattattgtcatggaatagtaaacatacataaattaaatgactcttcatgtctttttttcttcttcatcatgatattcataggaaataatcctcatttgactaattagttgggtcaccaggtgtaccaatagttattggtctttttctttttgagtaacaaataccattgaaaagtcatttaatttattatttgtatgtataatggtagatgatctggaggttattattatatctttttcgggtttgtgttaagtttatttatttttcttaataaatgattcattacaaaaggatttttttaagtgtatatttcttcttttttttctacttcttctttcaagggcaggaaaatctcatatattgtggtccttccttcaccactcccatgtggatggttcacgggttcataattactcacgcttacttagccaacatttagatatgactctatctaaatttttttgtttacttcaacatttctcacttgtcctacttttgttatcgaataatttttggatattaaatggaccttcccagaagttaattttaatgtggccaatttcttctcttttgtaattagctcttagacaataataataatgatatttctagattatctccatttattttcctattcatacgtgattctgttgtgcgattgaatgttagatagacggtgtagatgaggtgcaaaattttaattcagtctgacatgtttaattgtgaagaaaatgttgaaaaaaattaaaataaaagaaaagaaataaatgagaagagaatgcaaagtcttgaattaaataaaaaaatattaatagcaaaataattttaattaacaccacatgactatatcatacaataaatataaggaaaaaataaataagaaaaataattatttagcctgggttgaagcactagttgattttgaccgtgtgtagcaaaatgatccctctcctaagatacgacaaccagttggtttcgaccgacgtgtgcagcaaaagaatcccgaaacttgtgaacactaatgcttttgctctaaaaaataagtttttataggaaaagaaaaagaagatatttgggagaaaggagttatgtgcttgtgttgttcttttttagagaacaagaaatatatatatatatagagagagagagagagatagatcaccttgtgcagcaaacaaaaatatgatcattgtattcaacctatagttattaaaacaaacgtaatagaccagttgactcattaaaataaaatcttaagaaaatttaaaataaatattttattttataaaataaaattaatatatatttataaattttaaattaaaacacagatacttatcgatagaaaatagtaatagtgtgtaggatattaatgaaaggtgaaaggcttttttgttcacccccaagacttgttgatgttgagtcgttggtaacaatacacaccacctaacaccatcacgtgctcaccttcaatttacaatactcgaacgaaacgatttgttagattaagtaactgaaagattaatgttattatttaagaagcttctctcctgagggaggattaaaaaactgtctataaagtaagtttcattttatcctttgaagtgtgtgagagagtgaaaac

SEQ ID NO: 97 - DNA, 2000 bp, Glycine max
  source 1..2000: mol_type = unassigned DNA
acatagccccaaaaccactattgaatatcaattagaaattggaagggttacttaaccttccattaaacatacaagtttccccatgataatagggatcaaaaataatgatcagggattcattccaaagaaaagtttacaaaatcaattttcgctcattttataggagttaaacccatttttaagccaaaaacctttacgtataaacaacattttaaaagttatttttcaataaaagcatcttttagagtttactgtttttatggcatattcaccccagtacagtttatattgctttcgtttaaacaggagttcatgaatttctaaaaaaaatgtttatgatacttgtcatttcgattgttcatatggtgcctgtcagataattaatgtctccgtggtgtttaactgttaagtagttgattttttgtcatgtaatcttgtaaatgacaattctatcgttaatcaaacaatccgtatacacacacacacacggagaaactagtgtgggtttgaccaaggaccctgaattcttcttctttgtataaggtcaggcaagtggtagagttcgaatagtaagttttgaagtttaaagcttgtacacaaaatatatatatatatatattgataaagaatggatataattgttttacaacgtgcagcgagggaacccttcaatacgcacctctctaccaagtctaacttaaaaacacagaattatcaaacacccaatttatgtgttagaatgtcttgcttttcgctactactattgtctggtgggcatgatgattttctcacaaaataattggaatattccacttatctctggctgatcttttttcttacatttaagacaatagagagtattaaatttgttataatcgtaatatttatatattaaatagtatttatggtatatttaaatatatatatatatagaatattattttatatatgcatattatagttattgttaattcagcatgtgttctggtttctgaaataaaataaaaaaacaaaaatttgaaaaatagaaactagaataaaaaaaatcaataaaaaggacctcacttattattttgactgttactaattacggaaataagttacttaaatgtattaaattaatttttgaaaattaatgcattaaagaaacttatttaatgtattaaataagtatttaatgcatttcaggaaaaagcatttaatgtattaaatacagtttagaaattaatttttgtttcattttttatttataaaattatgttttctttttacatatttgtaaaattatttggagagatgaaaaaaaatgtgtaaaaagaaagagtctaccaacaagtagttagtccaaatagtattgaattcaaattttttaaataaagttttgttaaaattaattatgaataaaattgatagataattctaacataattacacaaaaaaatctttaatcataatactccctttagacctcaaatgtaaaaaaaataaaaaaaaaatcaattgtgttagattaaaatataaacaaattttaattaactatcacctactttatcacctacttaatgatgtattttcaaaacatcattcgtttaattgagttttatttttaataatcttatttttttttcttatataatcaatatagatgatattttaaggaataaattaactttttattgaaattatcaaaattaaataatattaactaattttttgtctaatggttgagtccagagagagtaatatttgtgggtggagttttactggtggatgtggacaggtgtgagccacatgttaccatgcagtgagtcagaaaaaagaagtggcaggatatccggcgggttcacggcttggaagttgcaataaatattaaatgaggatgcagatattcttcttctgtcggtggtatgatatatatatatatataaggccgggcagaaaggaaaggaaatactattacatagcagaagcaaagaaaatactattactagctaatgagt

SEQ ID NO: 98 - DNA, 3138 bp, Sorghum bicolor
  source 1..3138: mol_type = unassigned DNA
tgccacgacgacggagtacataccgtagactgccagtagtacatttactttaaccatcagtaaaatgtagcctggttgttgagaaactgtagtacatgaaagttggacttcagccgtagcttcgcatatataaacactgtttcaccgggagatcgatgtaggagtacgaaccaagtacgtacgagtatgcagttgataatgaactaatgcaccccatgataatcacgccacattgatctaaattaggatgaacatgttgatgtttcctcttaacctggttaattagacggcgaacgagtaagattttatttggagtcctatgtactccctgattccatttggagaaatgaggccaaggttttgctatcaacatcgaggtaagttagaaaacatgcaaaattaacttataaagaacaaaataaaagaaaagaaaggcagaattatgaccatatttacccgtttgagccacacctgttaccacttaatgaaaaacgcgctgttgcgtggtctcaaaaaaaaattggagttgtttagacaatactttctctatgctaaattataagacgctataattttttaaatgtatagttttgcaatgtacttagatagataagcaataatgtaactagtagagaagatatataaatatcttacaatttcaaaccgacaaatatattcctgaacgctggctgtagttagcagtcgcaaccaataatccagagacaacggtgcatgtgtgtgtcaatattgcagcaaccggatgtctggaacacgtcacgatgcctcaacgaaccagatcaagatggatcacgacgcgtgccaaactcctttacgcctagctggaccctttagcagaaatgggatgaacggttgcaacaacgttggatgagcagtgtacttcaggagccaattaaggagaaaatcattaattttgccggcgagcactatgtatgtgcgccccccccccccaccccccacacacacacacacatcctttacgagtaggactactacaggtatggttaatttgtacgtttcagtaaccgatttttgcgggtccagttggagacagaacgatcgaggaaggttttgccttttgggacagctcacaggtggctccgcggtgacctaggaaatgaattcacttagagcaagtacttcctccatctcaaattgtaagtcattccaacaatcttggagagtcaaacttttctaagtttgaccaaatttatattataaaataattattattatagtactaactaagtatcattagattctttgttaattatatttttatagtatactcactttacgttataaattttagtatttttctctataattttggtcaaacgtgaaaatgttttgactctctaaaattcttggaatgacttacaatttggaatggagggagtacaataaaatcacgttacttgacttagacatatcagcaaaattctagtggaaaaaagagaggagggagaaaagctgcttagcttggcgcaacatgtaacgtcgagtgcccaagtggtgtgtgtctcgctactgtcctttcaactacctcgcgggacacaacagctgagtgagcttaggttaagctaccatgttgtcattgctgttcacgtcatcctcgccgtcctccagcctcacgcggcgcctgctgtcatggtcgcgtccgcgtgtgctcgcctccgctgctcaccagtactgtgagctcaccatgggttcgcccatgcgcgctaataggatgggttgttcgtcgacgcgaacaaaagtgtggtgatgacgaagagaaaaggatagtcattggtggcccacataataaaaaaaaacacattgagaacagtaaaaatcatattattattatatgacttgtttttatgttagtctatcagtgatatggcttgacttaggtcactcacaatgcaagactctatcacagagtctaagacaattaattatacattatttatggtattttgctgatgtggcagcatatttattgaagaaagaggtagaaaaaataagactccaaatcttatttagactctaagtccacattgttcgaggtaataaatgactttagactctatgatagagtctgcattgtgaaggcactcacaatgtaagactctatcacagagttcaagacacttaattatatattatttatggtattttgctgatgtggcagcatatttattgaaaaaaaaggtagaaaaaataagactccaagtcttatttagactctaagtccacattgttcgaggtaataaataactttagactctatgataaagtctgcattgagtggcccgagtgctcttatagctaaatttactaggcttgttcttaggactttcgaaattactgccccgcgcacacgtcaccatgcttgaaaagttgaattaaaagtactcaccgtgttattatttactcaactattaattggaaaaaggcacgctggagctcagcgctagcagctgactgccataagaccatgtttggcaggttccgtaccggcctgagactctgtttagttttcaatttaaacttctcatctcattatatatacccaatgtttggacacatacctggagcattagatatagaatgtgttatagtacctaaaaacaaatgtgttatagtacctaaaaacatttttttcctttttgtaaactaaacaaggtttaagaatcatataagaaactcgactaaaatgattggaatctggaaataaaaactgatccatcgtttctgtttttttttttaaactctggaagcaagaatcaactgaatcctactgtagcttctagtttcccaagaaacgtttcttgattattatactaagtagggacataaacaactgaaaccctgggttagtgggaaaagggagccacagcacctgtccctttattagtagtaattaatataagcaactgtgccatttttgcatctggtcctatataaatagagacgtggaggcgtccaagacgcattcgaggcgacagacatcgtcgtcccagcaaagcacaggctctctccccggtcacccctctcgctcacgagtcacgagcatcccacctcagctagctagctccagcagctctctatcttcccgaccagggcttggac

SEQ ID NO: 99 - DNA, 3191 bp, Oryza sativa
  source 1..3191: mol_type = unassigned DNA
gaacctactgccgtgttgtgctgtggtgctgcatgcctgctggcgatgagtgctgctgactgcttgctccatgctggatgccgctggtctgctgcggcgctgcgcgcttcctgcctgcccgcggctgccgccgtcacacgttcgtgcctcactgccttagttgtcgtcgctgactcattcactcgcgcgatcgaaaattgggaatgacaattgcgatggaaacgaaaggacgcggtgcttgttgcagcgaaaaaacgaagcaaaacagttgccaacttgccattgatatttttctagaagtaacgcataggggtgatgggccttgggctagatttctatggtggtccatggaccacagtgtaactccgctcctgtgcttaactcttattcttatttttaaagaaaatccgctttacaactttaatttagatggatgaacgagaacggataatgcgcccgataaattagggatatcttcttttgtggttttcttttttttttgccggttcggcggaagaaacaccgaccaaattttattaagattgaaagaagttacatgcatccgacattagaccgtcgagttaaggcgagaagacctaagaagcaaaacaaaagaaaaactgagagaagaatgtaaagggcaagtgcacttagggctactcctcactaaaccttcttttgtggattgatgcatcaaaaaactatatgtactaggttacatcgtgttttttttttcgttttcgtctcattctctgcttcggcctgccgtctgcttataccgttaattcgatgatgactccagacttcattcatgaatatatttctactatagatatacaaccctcgctcctctatgtttatcttcatcttcatcttcaggagattcaaacaccacctcttaaagatgaagatgaagatgaagataaaaattaagtgtttcacgtaaaacgatgtattaataacatgtgattaatagagttttaattgttataaacttgaaaaatgaattagtatgatattttagagcaactttcatatataaagttttcgcacgagacgtaccgtttagcagtttgaaaagcatgtcacgagtatccaaaatttaatcttgtgcttgcagaagaaacgaagagggcctaacccatataacctgcgtcattaatctatagcttagcaaagtttacttttttgcctgcctcctggcacaggaacgccgacgaagaaaaacctacaggctttctcaactatgattccttcctcaacctgtgaactctggcgacaggaggacgacaggggtgtatgtggagcagataatgcacagtaataatccaatccttaggacttacaaactgctggaatgaactgaccaagtacgtttagaacgtaggaattttgacttatacatgcatagtgtgatttgtacgtgaaatacattaattaattttctgaatttgtttccaatttctcgtcgtcaggcaatgccgcaatgccttgtcttaaagattgcaaattgaatgcgccatctccatcgatctctctatctccattgatggctgcccaaaaaataaaaaataaaaagagccgacaatgtttaaggagagaagcatacgcgcacgtttcgtgatgaaacatacatgcaagactaatttcgaattatatatcacatattcgctctctgaatgagcgtatcgggtatttggaatttcgtttgatatgtaaaagttgaattttaggttacttttttgtggaataatatatcataaattaatattttttataactatttatgtgacatgtaaatgacgagctgatatcagtttaggataatttcctcgctaggtgattgaacgaaccctgcacgcggcagacgtcgtggctactactatctagctagctagcgttggttacgcgtggctactatccagccagaattggttacgccgtcgcccatcgatccgccacaccacgccaaacgcgaacttaattgctactatccgatagtatgtacgcgtactacacaaaagtggggaaaagaaggttgtcctgactccatgagaagacgatccaaaacacggggccggacaaccaaacaagctagctagcggccggcggcgagccaccgtcgtcgttgctgaagacgtcgactaatttggcctcccggccggcgccatcgatcatctcaaaattaatactccctctgtataagggattttgagtttttgtttgcactgtttgatcactcgttttattaaaaaaatttgtgacaatataaaaaacgagaagttgtgcttaaaatacttcggataataaagtaagtaaaaaataaataataattctaaaaaaaatttaataaaataagtgtgcaaacaatacaagcaaaaactcaaaatcacttataatcatgggacggagggagtatatagtatccaaaaatcatctcaaaattaaaaccgaatcgaaactcgccgggccgcggcccgcccggccgtcctggcccaattaattccggcgaccgctgcatgcaacgctccgtacgtgatcgcccagcggctcgcgcgcgcaccacgcgtccacgcgtctctctcctttatacatggacaatggattaatttacttgtagaaaaaaaaacacgaggctagcttagcttgtgcccggcccagccgcgtgcgtgatttccccaagttcacaacctgtacgtgtgtgtggtacgtagcggtcgcaatcccgtttcaaatctcgatcgtgtgtggtgccattaactccgtctggttggggaagccggtggcggatagcccgactgacaggtgctgtggcctggcggccggccggccaatcgatggatggacggatggatcccatcgatgatccttcgttgattcgcgtcaacctctcgctgcccgaatcggactctcaccttccccgccctccaccgctgtgaccgcgcgctgtctgtcccttggctaataccagtcgcagtgcaactgtgcaagtgtttcacgtatataaaagcatcccgagacgcagcgcgcatgaccagccgcgttgggtgcaaaaccacaaccgccaacatcttctaactcccctcacggctctccctctccccgcacgcacaacaccggtgaacccctacgtactactgagctgagctgagaggacgaagaagaagatcaagctcgaggggcttgcgatc

SEQ ID NO: 100 - DNA, 3380 bp, Arabidopsis thaliana
  source 1..3380: mol_type = unassigned DNA
aaaagatcaactattttcaaaacccattttagactccaatacacatgatcacggtgtgacgaaagagagatagctctatatataaactcagacaacgattgataggcactgatggctcaacgaatatactttaaaattgcaatacaataggattgtgaagaatatctcaacctgcaacattatggtgaaaactttaaaaaacaagcaccgatattatataaagaaattgcatgcattagtcatacgttatatgtatatatattgtgtgaaaactcataccttatactatttgatatagaatatgaatgtcataaaccacaagcatttgttaagtataattttttgtatacttattatcttatctttctgattatttatagattttaagaaattaaatctttttttttggtatctgtgtgttactttttataaatgtattttgaaaagtattatttcaatttatagataaatataattatgactctcaagtggatttttttttcacggtcaattggagtttggctgtgaatcttgtgaataatatcaactaattaagagtcggccgatactccgtatctttgatcactttcacccatatcttgaaatttaccaaatgttttctttcattggggtttctataccttttttttttggttctttctgtaatttgggttttaaagaaaaaacctataattacaaaaaaggttaaaagttaaaactaagcacgttcaaatatgttctttcgagatcccaccttcctgtctatcttataagaagtcgaacacgtgtgctcgttgtgtgaattagagtggttatttcaacatatataattaaactatgtatgtatcataaatacactgaatatgttggagttgggtcttgtggtaggctaacttgttcgcttcactttggtttagtttagccttgtaatcggtggtttcatatactgaaatttttaattttctaatataatccagatgacaaaaaaaaatcataaatacactgcaatggccatttttaaaaaaactttaaacgaaatatatatacatcaccaagtatcaagtaagtaatttggttgttttgatttttcaaaaaaacatttaggtgattcttttaacaaccaatcatatatgtagcaaagattaattatgtcaatcttttaacgtcacttatatagtttagctgtagtattattgtaagccaattgtacggacttcgtaaccgtttcgacaaagatacaaactaatcaatgtttaagatggcataatattccgacttcccctgccactcggtagtactgctgcgccatcctacaagaagcactcgtaaatgagtggttagacggccaaaaattagcaggattcaatccttgattaagagatggttcagataagccctctaggcctctactcgtcacaattcatatattaattgatcacactgcatgaaatgataagatcaagtcaattacctcaaaattaattgaaagataaaatgataaagcaacaagtaatgatcatatatggatgtaacaaccttcttcatccatacgaatatgataattcttttgtcgatcatttgccacatctatttaactaagtattttgtacattaagatcattttgcgagtattcccgcgttcccaacaaaaacgaattgaaaaactacatagggtgaattttgctctcgtggcattaaagagagaggctgacattatagattatgatatatttattatttttcttagtagatttcttgaccagcctttagatatgcttgctctgtcatggcataaagccttaaaccctaaagccctttacatttgtacagtaccaacaattgtacccaatgttaaatgaatgcggattaatttgtgatatgagaccatcaaaataaaatacttataagatagtagatatatagaaccgtaacaaaaagatgagaagaaaaagacaaattgaatagaaactggaccaaaagataaaagagtatatgaagaagcaagccaccaagaagtgtaaccatcgttgcttcaactgtaaaccgcacattaaatgtgtgtgagagaaagagagatagactccagctgtgagagctacgtccattgcatcaattgggttatatgtcgttaacaattttttaaaaatacataaataaatcaataaaatatttagaaaaaatcaatattataatgatattttgaagaagttaggtccataatggaaatatagagacttagtgtctatttatcaagaaatagtgtctatttatcaagaaataatgtctatttggtccacaattatcatattttttgtggccactcaaactacgaaaataatgaatattgttaatttttgtcttatttaagtctataactaacttactaattcggttgaaattgctaatatgcattttccttggtccactattacagtgctactgctgtcttattcttgaacacaaaataaaaaagatttcaaacacaaaatatgcatttttttgttccaccattacaaacctttatttggagaagtatacagttggatattaaatattttaattaaaaaattgaaaatattgaagttctttttctccagtattttggctggagcaaaactaaataaattccaaattaaaagctcgaacggaaaacatttactatgcaccaaaataaatgttgatatgaaatttgcatcagcatatacagtatgtatgtagtacaattgaacagagtcaaaattaattgtcactgaaacagtcagattttatttctgttaaaaaatattttcagacaaaaaatgattttttaacgtttttttatataattttattaaacctcaaaacattcctcagcagattgttttataatgttattattattttttcttaaataattttatttgaatttcgttatagagagataaataaaagatttttggggtctagttggctctcatagtttgaatgcttatataaggaaacagagctcgaggctctcaataatgccacataaaacacaacaccaaagcctttataactctttctggggtttttaattctctcaacgaacaaaaaaaaaaactcaactaatattctccatcctctttcttcagatttaagagaaaccttatcgttatattctctcttctcttttctttttgactcccacaagaagaaagcaaatttctttttctcaggattgcttgaaaactgtagaaatctttaaggtttttttacaccaataagagtcagagagagagagagagagagaaagagagatctattcataaaaaagacaggtaatctcaactccgaggagataactgatataacaatttgagagaataagaagaagaagaagaagaagaccaagctaaaga

SEQ ID NO: 101 - DNA, 3292 bp, Glycine max
  source 1..3292: mol_type = unassigned DNA
cttttaatgaatcttaaagagcaattgcggaagttaattgaatctaatataatgtcttgaatttataatatatcataactaatagtatttgattttaagatttcaaaagcctctcaatttgaattgcttcgtagttggtattgaaataataaattcgtcactttttataaaataaaaaactttaaaagtgtcttgatattacaaatgtaaatatttcatgtatttacaatcggtagtacacattttaataacttttttcacaataatattttttttctgaaaaaattcaaaacctaaacaaaaacataagccaaataaagaaactcatctgaaagagaaacacaatcatatagaaaattatacatcttaatatgtaaatgaagagtttagaataaaagaaatagccgaatgtgtgttgaaagtaacaataagagaaggccccaccgagagaagacttgaacaaaatcaatttaaaatgagcaatacaaaagatttgcaatttaaaaaaaatctcaaaagaataaattttcgactaccagtaattggattttaaataggaagagattaaaaaaccacctcttaatcttatattccatcttccattccataagattgtgggtgtcattaaaacttattatcaatacaaaatgaaaaataaagagtcacggtttgttgaggagaagaatgcacttagttccaaatcccaatacatgtattaagtagtttcgttaacttttttttattaaattttaattatgttcaattaattatcaatttctataattaatttattattttaccccgaatttgagggggaaaaagttaaacttataagatactttccatgttttttaaaaattgcattcaatatttttcttttttttttcaccctaaaaaaatattttaattagttaactcacattacactcagatccccttaacagaaggtccatgttgatcacattatttttaataaaaaattatgtctaaaataccctcaaataaattacacttgcacttccatgtgtttttttaaaattacatctaatattcctccttttttgtacactataaaaaatctcttaattatttagctcccattacattcactaagacttcttccctctcctaaacacagtttaataatttaatagaaagtagacacaatttgatcatatgacttttaatgaaaatttatatctaaaatattcttatcttcttcctcttaacttcataaaaaacataacattattttgaacctgaaaatattttaatacttttttttctctaattgaacctgaactcaccttgttggtacgtatgtgttaatatctttccttttttttttttacttcaattttttttgtgtgttgagttgtttggttgcaacatttttgttggacatgttcccaacaatgccaattgattgaatatgatcatttgcttcaaattttaatgttttgttcatgcatttgtgttttaactcctttctttgaaatatttatttttgatgactagttgcttgatataatgtctcaatcaagagtttatatcttcttcgagtaatagcaacaacgaagtaaaaataaaatattaaaggaaaattgttattgtcttaagaaaaattcattaacagagtcaattgttaatttgttattgagtatttaacaaagatgttaggacaatttcatctgctcatatattccaattgatgttaattaacgacgttaacggaaagagataaaaataatgtaaaaaaaggaaggtatatcagatgcaatttgagaaaaacacaagaaatacgattataacaaaaatgttaaaacaattttatctgttcacatatttcaattaacgtaacaacgttaataaaaaagggataaaagtaatataaaaaagagaagtatcaagtgtaatttgaaaaataaaaaaacacaagaaatacgagtagtgtaattttttttagattaaattaaataataaagtctttgttaaattaaacataaggttactttataatgctctcataatgaaaaccggatttagaggtaactccaaacctaccttatctaacagctgagaggtactgtttcacctgccaaccatataaggcatttactactactctccagatctcttactgctggattacaacacgctacagcaacacgacgcgcggggtgtgtgttttcgtttacgtagattttaattttttaaggctctaattataattaattacagcgtaattaatatggagtactataaagtataataattataataagccatgtatataaaaaggagaagtgtatctgttaatgtgtactaatatcttacacaaaagtatctgataggagtgctcgtgaaatgaaataaaatgatgttattaccagaataacaaatatagaatttagctaacatatatagttaggttaaaatgtttttatataaatatttaatagaaaattacattctccttacattatagttagcattaacgattaagatgatataataaaatgatcaaatcttattaaatatctgtctaaaaataacttaaactaatataatcggtatataaacttaactcttaaatacaacagtgattaaaataaaatcaactttatcaattattatatttaaaaaattaaatagaaataattttatgaaaaaaattactataaaatgcattgataatattgaatactaataatttttaatagtttgtttttagaccaccaaaccagaatcaatcaagggagggttatttcagcttaactaagtttttatatattattttatttatttcataagattaaaatctcaagtgagatacatgaatcaaatagtagtacttttttttagaatatattaattgataatttaatgtcccagttagcagaagacaggtgggagactatcttactttgtaggccacaaggatcaatgcatgatccgcagcgcttataaatacgtgatgggacgaaagaatatatttttaagttgtggctcaaaagcaattactactaagaaaggataaaggaaggaaggaacacttttctgatattctttttggtattgggttgctgacctttgctagtgttatagattttttgggttctcttgtgttttaataaatacaggaaaaaaaaagtatataggtgcctagaagaaaagacaatatagggtgtggagcaattacgtttgatcacaagggaaaaggtgcaacggtttgcaagatagcatagaagattttgaagaatcttaattgcaacatagtagtgcagttgca

SEQ ID NO: 102 - DNA, 3000 bp, Arabidopsis thaliana
  source 1..3000: mol_type = unassigned DNA
gatggaattgtctttgtagaaaagtctagtctttgctatgtttctaacggtctttggtttgtttctcaatgttcaataatgttatgtaatggtaaatatttagcagcggtatagttcattctcttgatatcggtttcaaatttttatttgaggttgaaaccacatgaacatggtcgatagtctggtcttttttgatgttaacattcatataacaattagtttagattgagctgtggtagaattttgagccagtgctgctaattggagtttgtggtaatctagtaattaccaaatttaaccaaacaatgaaaatgacgttgtcctttatatcatcaatcaggggaatgggaatgaatattcctctttacttttcaacctttttttattcaccaaactaatttcttcatgactctgtcataccaataagagaagccatacgacattttttttattttgtggcagactcttatgtgtaaattattttgtgaccaactcttgctggtcggttattctgtggaaccgacattcccatgtgctccaaaccgaaccaaaccaatatgttccactacttcctttcttcttcttatgaaattgttttccatgattttgttattattcagttctttttaagtgcgatgatccataaattcggttcaattaattctcactttataaacactctaaatatcatcaacactatataacctcagtttttgtatgtcgttttaattctgtcatcagctttgatatgtttaaccaacatgattttgtatataacaatagtttagcgatttggttgttctccttaaatagagatccaccaagtcatatgtgatgtggacaccgttttgaccggaaaagtcgacgaattatcatgtttttcaaacaaacttgacgtaaaaggttcaattctttgtttgcaacgacgaactcatgatcacttctcgaccgaatctacaacgaaacccatatgtttcttctacccaaaaaaaagtaaaaagagatcttcgagtcatgttgacctttacgacttcaactcatatttgtcctttcaaaatttgtcatggccatattgttgtctcatggagaaacacttttgagccaacagtcggaaaacaaccatcacttagcatttttttatttttaatactactatttttttttttgtaattagtcgagtgtaccaatcccaaatttaatgggtatctttcataaccaaaaagaaaaaagcacaaaaacaaaatactactactatactataatggtgaaacacacattacattagcattaaccgctattccttaaaagatatatgagcagactacaaggaagtacatttaaatcagtgtgctaagttttctcaattatcaatctaataattgtacttacataaatttaccaaatcatctcaccatttagggcatacaatttttgctcaataatggagcttgaaaagactaattatagaatgtctttttggttgacacaagctcgcttcttcatgtcgtttactttaaaaattgtagattctttcacaacttataagattctatagcctatttgattatcctttaggatgatgagtataatatctcaaactataaaataaaaatgttcacatcaataattgaaaaaaaatgcatgtatgaattcacgaaaatatggttacggttgtgtgttgctgctagacaaaagtctttcatatattcagttatatttcttaaaactaatcaaaattgttttatgcaattttggcgagtagagagaaaaagcgcgtgggataaataaagaaaggcgttataaaaaaagagaaaaagtcaaccgagtagttctggtaagagagtctcgtgcattcgtaaggtttccaagagtccacatatctatttcatcatcctcttaacgtttttctcacttacttttttccccactcttaattgattccgttgataaaatttgttcgttatatagaaataatcagaatataattagggttaattttggagtaaagaccattcaatcaatggtttggcttgattcttgtttgaaattctatgtttaaaaagggtaatacttacaaacttgactttattagtattttaaaaaatgacaaaacttaaaatggatttgaaatctagcatatttaactttaatacagttttggtttaagtttcactctcttttctatcaaaaatataattttaaaatttgaaagatgttaaaatagacaaatgtcattagtttgttcagatttagttatgtttttaatatacagacaattatattaaaataataataaaaaagtcagatcagttataaaagaaagtcagttcagttttaagacttaagtttgagtcttttggatttgaatttaatagattcacttttattaaaaattgttgaaacactttttaaaaactaaaacatttgtcaaaaaatgcatttaaccaaaaaaatgaaaatgaaaggtagtaagtaataaaagaagaaaacaaaatctaaaaaagtgtctttaaaatctcaaaattaaaatatacaaaaaagtacaagaaaataaaagaaaagggggaaaaagagagtcaatatcaacatgcaagtgtgaatattagactcttcttctctcatcagttaccccaaaactagggtttacccattttcatcatcttcttcttccccacatcactctctgaaagacaataagagagagagacacacacaccaaaaaaaaaaccccattgatttttaagagagagagagagactgagaacgaagagcaaatgagagagaagttgaatcaaatttccgctttcgttctctttctctctcctccatttcagtaataaacactccttcctctttaatttttctgggtttcttcttcttccctcttttgttgtttctgtgtgattcagttctcgatccatcttttcgtgaaaagtatcaatcttttaattctctagttgtttgtcaaatctggttagtttcttctcttgtatttatttg

SEQ ID NO: 103 - DNA, 2983 bp, Zea mays
  source 1..2983: mol_type = unassigned DNA
taatgaggcataagggcatgtacaatcccataattaagagactctaaagattatgtaaaaaattaaaaagatagactctttgtgaagagtctgtctctacacgatagagatggcgatgagacccgatcttcgatttctcgctgggtattcttcattaggtggtgtgaatgtgaaaatttcttccccacggagatataacacagagaaaattcttccgcaaagagtaacccgttaaaccatgtgacgacgacattttcatgtaatagttaatgataaaaataaataattatgttgttaatatattatttattctataaatgtgttttttaatgtacacataatgatttcttacatctcaaaatgtatataagcgacaaagttttgcattaataacatatgaagtacatcataattagaatttaaacggggaacgatggtggagaataaatgtccccgcaagcgttcgtagggatctttgcgggatttttttttcgtcgcgggcccgaggatgggagctaaaacccaacgagaaatttctcattgctatccctactacacgacactatatatatgtattgtgtattaactgtatttatgatctaaaaattcataactctatcgtatagtctctcttagttatctctgtacctatcgatccaagagctcatgcttgtacatatcctaacaaaagttaggcaacgataccgattgctatagcttctagggacatttcattgcggcacatttacgttgggaaacaaactatcagggtgtacattgtgttgtgtgcattcatggtacgtaggcagagcgttgaacatcatgttttaatgtttatcatcagatataccgttgttccgactaataagtaaattgtacataaatgtacaatatttttttaaaaaacatgtagtcagagctcataagtttatccgtcaatcatttaaaaaagatatatttgaattggtaattaacatccacacaacgtcattagactttgtttggaaattaaatgcccttggcaatttgtaactctatgaatctgttattatttttgttcgaataaaatgcattcgtcgaagtcgtatgctgacacctaccagtgttcagaacgacattcatttatcgctggtggtggtaatatagatttgatttttaaactctaagcacaagacacaattaaggtagatacagtggtgtgtctaaaacctattatatcttactacatttatttcaccaatatattaatcaactacgtcttctatcttgaggctacaaacaagagacgtgtgtttttttttttgcatttagctcttagacacgtacatgctctaaggaaggaaagcatcacaattccatgttagtacgtgtctttttttttcatttttctggcagagcacttacttgtaatgacattactttcctttcgacatgtcgatgtttttgaaaaaagaaagataagcttagtggtattctacgaaagacagtagaaaacagatactctcacatatatctacataagtatactaaccacataaacattttagaaagttggcgaaggacgactgtgaagtcaccgcaagaatttggatatcggagtataacctatcacataaaacaataatttgctaaaaacacacacacacacacatgacccatacggtgttagtactcgaatatgcatgcatggtgtacatggaacatacccaagtgtgccttgctgatgagaaacccatgttctaggggagatggcttgacgctaatgcctagacggggcatttatgagaataaatgtggatgtggcgcccatgcattttcgatccaaccatgcggaaaatgatagccagcattgtagtattaggagtagtggttagcgagaggaagtagggaggccgagctggtcgtgaggcggacctgctgagcgtgagcgggcgccgccgccgcccagcagcagaagtccggtccggtccatccagcggagccaagacgccgacggtagtacctctcaccaaacaaaggaacgacggaggcagcgcctcaatattcgtgtgataacgcctctgccaggcgcgtgggcccaccggtccccgcacagctcggtccgtccacctcggcagcattcactcgctgggtcagcggccccaacggcctcggcctcggcgtcggcccggtgtggtgttgtgttcttccgttccattcccccgtccccgtccccgtccgtccccccgcccggctggctggctggcatgggtcgggtcggcattgaatcgccgcaccaaacccccgtcggatccagatcacacggccccccacagtctcgaccccatccttccagcacggagtcggtgacgacaaacaaggcaacaaaataagcggcccgccccctttgactgcgctccctgcctgtgtgcccgagccccagggcccaagcgcctctctctctctcatcagcagcgacaccggggaggacaggggagcgtcagcgccgtctccactctctctcgaccgaccccatcccttcccttccttcccttgccccccccagcctttttcatgcgtccacaccacacgcacgacgggactcttccttcgctggacgactccctgtgcccgtctcgtcgtctcctctcctcacctcccctccacccccacttgctattttgaccctcctcccgttcctttctttaatccatcatccgcctcgctatccctccctccctccctccctgcccgccgtggagggtttgggattttgcggacctcagcagctccatatctcagtcacacactcacgcgcgcgcgggggccgggggccgctggacccgccgttctccttctcctccccccctcgttcctctcgtctcaccactactaccctacacgcgccgcggctaggattccgccgaggagacgctgcgcgcgtggatctccggtgctgtcctgctagcgtgcgacgaggccaggcaggcgcgcggccggcgcc

SEQ ID NO: 104 - DNA, 3000 bp, Oryza sativa
  source 1..3000: mol_type = unassigned DNA
aaatcaaaggaaataaaaagattgaagatcctaaggattcaggtactatagcaccatttggtttacttgaatcagtcactaaaagcaaaggaaagtttcctactcgagcgatttcaaggggaaaaacgtgggggaaaaaacatgcactatgagctttttttctttttctttttcttcccgtgggtcgtgggaatgacaagcgaagtgcgatcacgtgatggccatagacttactgtattgatttatcatagctttactttctagtatattcattaacatgcatgtaaagttttcaacagtgtaccttacgatatctacaagtctttatttgttttataatccctattttacacaagcaaccgtgtccaatttctatgtccttttctaatcaccgttctaaaggtgtccttcaagtttatttcgtgttgaagcaggagacaaactccatcccctattcgaccgaaacattttctttctcaccaaccaaagagggttttacttatggtaaatacttctcgacttgtacttctaaccaaaaaggttttacttgtagcaaatactttttgactcatgagacatataaatttcaaataaccgacgcttggaaagaagtgttagagcctactacaagaggaaattaagtgctattcaaatagggctgatggagcgtgaagattagaaatcgtttttatgcatcggaagggaaataaggaccatccattggcaagcacttaaggacaatggctggattaatgaactccggcagcttattcatgatccatatccaaccttctcccatctgcttatgccttggactaaccatcccttagagggtattgtgaaaagatccttgattcctaatgaaatgatgaagtagtggtgtgatatgtcgtcgagcgaggaatattccttggaaagatgcctcgggaaccactctaaccactcttgcaagctagcgccaaaagatatggggaccacataaatgtacaaccatacccttaggtttttagcatgacatggatattgtagtaacttcctatgtatcctccggggtaagattgtaacttcacatctacctccagggactgtgtaagccggtaataatcctgtagcacgacacaaacataatcaatagtaaaataacacactacttgtacatattaggctttgcatttcgagttcatctcattttcatgatatgcgggggaaataatatctcctcacctatcccctatttatctgtgacaagatatgatagatctatttattttggatggagggagtagataaacactaaccaaatacaggaaacataggttaaagtgtttggatgacgctaatgcagatgaacccgaattcatgcgtcacatgaagcgacagataagatttggtacctaccaaccaggggctgtccatccaaacttcacttcctacaagactggaaagccggactgtgatcaaaattgggcataccatgcctgatgattggccacatccagccctgtttatgacgcgattactgacccatgaacaaccaatgaagattctatatcaggtcgtaggatatcttgacagcaacagaaacaccaaacgatcgcagcatggcaaaaattaaacactctccaaagatggggatggtacgaaagataggccgagctggtcgtgaggcagacgcctcctcctcccccgagctcctccccggtccagcccagccagccagccggaccagccaggacggttcccttccacctactgtaacaccattgaagcgcctcaatattcgtgtggagcaagccgctgacgccgcccccaccgtcggatccgcggtcgggccccacatccgccgttcactgggccgccggacccaccgcccacgccgcggccagtggctacgcgctgcattaacgcccgcctccataacctcccccctcctcatcccggatctacgcgtgcgtggggcgaaagacactgaccgtgggcccttcggctaccgtggggcccagcgtcatggactggctaggctagggagctctgtatgaggcatcctgtgttttctctggggcgcattcaattctgcaccaaactgcaacccgtcggatacagatcacacggcccccacacccgcgcggctcgcccactgaccatgggcccacggacgccagcccaaccccggcctgcacaacgtggcctcgccatctcccgaccgctcgatccccccgtgtcccgtccgtccccgtagatcaccggagagagatcataacggccacgccggcacacggcgcgtacggcgcaccggtggaggagaggaagcgggcaccggcgcctctgacccaagagagacctgaccgacccctcctctctgctgtgcacttcacccgcaccaaggcaaaaaaaaaaaaaaaaggcgacgcggaacgcaacaaaatactaagcgcgcacgcatccatccggccgtttgaccgcgcaacccggctgctgctgccgctgcctgcctcagcgtcgtcagcgtctcgccatccccgcccccacctcacccccacgctccgctggttctatttttctctcgcgtccacacgacgggggggcctcctctcctctccctcctcccctcgtctccacactagacttgccattttgaccctccgcttgctccctcctcccgttcctatctccccgccgccgtacataagtgctttctttaatcggatgcgtcccctcccctcgccaccagttcgttcgctcgctcgctcgctcgctcgccttgttaatctatccctccctctctcccgcccctccgtccgccgtggagggttagggttttgagggttcgctcgcctcggcgaggctttatctctctaccagtagtctcttactcttcttcgttgggccgtgggttaggaatcgggttgtgaggcgtgtgggaggggcggggtagatccaaggaagaggactttctcgagtttacgccgtggtgttttgcttcggcgaggaggcggcggc

SEQ ID NO: 105 - DNA, 845 bp, Hordeum vulgare
  source 1..845: mol_type = unassigned DNA
gtggatctcgatgtgtagtctacgagaagggttaaccgtctcttcgtgagaataaccgtggcctaaaaataagccgatgaggataaataaaatgtggtggtacagtacttcaagaggtttactcatcaagaggatgcttttccgatgagctctagtagtacatcggacctcacatacctccattgtggtgaaatattttgtgctcatttagtgatgggtaaattttgtttatgtcactctaggttttgacatttcagttttgccactcttaggttttgacaaataatttccattccgcggcaaaagcaaaacaattttattttacttttaccactcttagctttcacaatgtatcacaaatgccactctagaaattctgtttatgccacagaatgtgaaaaaaaacactcacttatttgaagccaaggtgttcatggcatggaaatgtgacataaagtaacgttcgtgtataagaaaaaattgtactcctcgtaacaagagacggaaacatcatgagacaatcgcgtttggaaggctttgcatcacctttggatgatgcgcatgaatggagtcgtctgcttgctagccttcgcctaccgcccactgagtccgggcggcaactaccatcggcgaacgacccagctgacctctaccgaccggacttgaatgcgctaccttcgtcagcgacgatggccgcgtacgctggcgacgtgcccccgcatgcatggcggcacatggcgagctcagaccgtgcgtggctggctacaaatacgtaccccgtgagtgccctagctagaaacttacacctgcaactgcgagagcgagcgtgtgagtgtagccgagta

SEQ ID NO: 106 - DNA, 1995 bp, Setaria italica
  source 1..1995: mol_type = unassigned DNA
ctttgccgtgtgattttacttctcgtgtgtcatgaacagtggaaatcgtgcgaatagttgtgtctgcatctgcaccgtctcgtggttgcggcttcgccgaattgcattctataacaagctcattacgcgcttctgctccgaaccatactgaattgcattctataacaagctcattacatgcttctgctccgaaccatactatgtaaacgaactagtcatcttttttactaacctatgggttataagcaatagtgcaaaaaatcggaccggttcactggctcaacagaagaaatcgtgaacccacgactcggccagtttggttcaactaaaatcaaccatgtaattagaccggtgacaacccgtagaaatgaacggttatgtgtgtcgaactagcggtgataaatttgatgttaatttggaccttaatttgaaactatcactactggagatctgcttttagtaccggtgccaaatgcgcagtccctgggactcgaaatccacgatctccatcctcgcgcaaggcttctttaccacctcatctacacatcacaagtgattgagttggaattttggagaggcttttagcaccaaccttttagtggcctttagtaccgggtcgtaataccatccggtactaaaaggggtcccttttagtaccgggtggtgttatgttccggtactaaaaggtctctagcgacctccaaatttggacacgaagcattattattggatcaataaaaggtctctagcgacctccaaatttggacacggagcattattactggatcaaaaggcaaccggtattaagaatgaggatgaaaggttagcgacctccaaatttggacacggagcattattactggatcaaaaggcaaccggtattaagaatgaggatgaaaggttagttttccagtagcgatggacaataggctataacaatattgctatgccgtcacgtttattatgtcatatatatgtgatatttttggatagatcttattacgatagaaataattgcatatatttcataagtcatgagaaataaattaatattgataaataaaataccgcgtgttggatcggtaaactaacgaacgggtagcctggtttcatctcggacccggctcccgttctaacggcatgggagaacacgatatgggatgtcgagacgaggcatgactctctgctttacacctccagctctttttcttttcctacggtccgcttggcagatataggtgtttatttttaatacaattttcctaaggttaatttatcatgccatagcctattttttaataatgacgaaaaataacgatgaaaaaaatcggaacatatattttataagagaacaatgggtgtgtgacaagattactcctagctagtagctagcctatgcgcatttccttgctccacggtgctatccatcacaagacgagaagcgacatgagaacgataaaaacaagtcaaaatgtagcaaaggggattctgaccaatccagctagcagtcagcaagtcacgggaactctgatcgatcgatgcgctagctctagccagcgccagccccatgtccgatatgccgaccatgcacaccattcctcgcaagtcgcaaccgctgacgatgctccgagctccaccctgagatgtctacttggattgaaaaagagcccacttggcaccaagcgacactccaaacgggggcagaatgcatacgtttccagcaaatccagcgtcgttaccgtcgacatgccctaggagcgttcatacgtttttttaccggtagaggcatggcgatttggattggcggatggctttggcttgcccgtgacctggcacgcgccgaatggatcgaagcgcgcgagcactagcacgtcacgggccgcgctatccccacgctatataaggccgccgccgtcgtccgacgtgatcatcacacgctcacacgtcgcaagcatctcatcacacagcagtcaagggggatcgtcgatcgggttg

SEQ ID NO: 107 - DNA, 17 bp, Zea mays
  source 1..17: mol_type = unassigned DNA
tgacgtaaggtatgacg

SEQ ID NO: 108 - DNA, 14 bp, Zea mays
  source 1..14: mol_type = unassigned DNA
cgtaaggtatgacg

SEQ ID NO: 109 - DNA, 22 bp, Zea mays
  source 1..22: mol_type = unassigned DNA
aacaacgtaagcgcttacgcac

SEQ ID NO: 110 - DNA, 16 bp, Zea mays
  source 1..16: mol_type = unassigned DNA
acgtaagcgcttacgc

SEQ ID NO: 111 - DNA, 14 bp, Zea mays
  source 1..14: mol_type = unassigned DNA
cgtaagcgcttacg

SEQ ID NO: 112 - DNA, 14 bp, Zea mays
  source 1..14: mol_type = unassigned DNA
cgtaaacaaatacg

SEQ ID NO: 113 - DNA, 14 bp, Zea mays
  source 1..14: mol_type = unassigned DNA
cgtaaacgcttacg

SEQ ID NO: 114 - DNA, 17 bp, Zea mays
  source 1..17: mol_type = unassigned DNA
tgacgtatggtatgacg

SEQ ID NO: 115 - DNA, 14 bp, Zea mays
  source 1..14: mol_type = unassigned DNA
cgtaaggtcttacg

SEQ ID NO: 116 - DNA, 14 bp, Zea mays
  source 1..14: mol_type = unassigned DNA
cgtaagtccttacg

SEQ ID NO: 117 - DNA, 14 bp, Zea mays
  source 1..14: mol_type = unassigned DNA
cgtaagtgcttacg

SEQ ID NO: 118 - DNA, 14 bp, Zea mays
  source 1..14: mol_type = unassigned DNA
cgtaaggccttacg

SEQ ID NO: 119 - DNA, 14 bp, Zea mays
  source 1..14: mol_type = unassigned DNA
cgtaagaccttacg

SEQ ID NO: 120 - DNA, 14 bp, Zea mays
  source 1..14: mol_type = unassigned DNA
cgtaaggacttacg

SEQ ID NO: 121 - DNA, 14 bp, Zea mays
  source 1..14: mol_type = unassigned DNA
cgtaagcacttacg

SEQ ID NO: 122 - DNA, 14 bp, Zea mays
  source 1..14: mol_type = unassigned DNA
cgtaagggcttacg

SEQ ID NO: 123 - DNA, 14 bp, Zea mays
  source 1..14: mol_type = unassigned DNA
cgtaagcccttacg

SEQ ID NO: 124 - DNA, 14 bp, Zea mays
  source 1..14: mol_type = unassigned DNA
cgtaagtacttacg

SEQ ID NO: 125 - DNA, 14 bp, Zea mays
  source 1..14: mol_type = unassigned DNA
cgtaagatcttacg

SEQ ID NO: 126 - DNA, 16 bp, Zea mays
  source 1..16: mol_type = unassigned DNA
gcgtaagcgcttacgc

SEQ ID NO: 127 - DNA, 16 bp, Zea mays
  source 1..16: mol_type = unassigned DNA
aagtaagcgcttactt

SEQ ID NO: 128 - DNA, 16 bp, Zea mays
  source 1..16: mol_type = unassigned DNA
acttaagcgcttaagt

SEQ ID NO: 129 - DNA, 16 bp, Zea mays
  source 1..16: mol_type = unassigned DNA
acggaagcgcttccgt

SEQ ID NO: 130 - DNA, 16 bp, Zea mays
  source 1..16: mol_type = unassigned DNA
acgtgagcgctcacgt

SEQ ID NO: 131 - DNA, 16 bp, Zea mays
  source 1..16: mol_type = unassigned DNA
acgtaggcgcctacgt

SEQ ID NO: 132 - DNA, 16 bp, Zea mays
  source 1..16: mol_type = unassigned DNA
acgtaatcgattacgt

SEQ ID NO: 133 - DNA, 16 bp, Zea mays
  source 1..16: mol_type = unassigned DNA
gatcggtataccgatc

SEQ ID NO: 134-135 - skipped (2 entries)

SEQ ID NO: 136 - DNA, 16 bp, Zea mays
  source 1..16: mol_type = unassigned DNA
acgtaagcgcttacgt

SEQ ID NO: 137 - DNA, 20 bp, Zea mays
  source 1..20: mol_type = unassigned DNA
acaacgtaagcgcttacgca

SEQ ID NO: 138 - DNA, 18 bp, Zea mays
  source 1..18: mol_type = unassigned DNA
caacgtaagcgcttacgc

SEQ ID NO: 139 - DNA, 15 bp, Zea mays
  source 1..15: mol_type = unassigned DNA
acgtaagcgcttacg

SEQ ID NO: 140 - DNA, 15 bp, Zea mays
  source 1..15: mol_type = unassigned DNA
cgtaagcgcttacgc

SEQ ID NO: 141 - DNA, 13 bp, Zea mays
  source 1..13: mol_type = unassigned DNA
cgtaagcgcttac

SEQ ID NO: 142 - DNA, 13 bp, Zea mays
  source 1..13: mol_type = unassigned DNA
gtaagcgcttacg

SEQ ID NO: 143 - DNA, 10 bp, Zea mays
  source 1..10: mol_type = unassigned DNA
taagcgctta

SEQ ID NO: 144 - skipped

SEQ ID NO: 145 - DNA, 21 bp, Zea mays
  source 1..21: mol_type = unassigned DNA
ctgacgtaagggatgacgcac

SEQ ID NO: 146 - DNA, 16 bp, Zea mays
  source 1..16: mol_type = unassigned DNA
gacgtaaggtatgacg

SEQ ID NO: 147 - DNA, 15 bp, Zea mays
  source 1..15: mol_type = unassigned DNA
acgtaaggtatgacg

SEQ ID NO: 148 - DNA, 13 bp, Zea mays
  source 1..13: mol_type = unassigned DNA
gtaaggtatgacg

SEQ ID NO: 149 - DNA, 12 bp, Zea mays
  source 1..12: mol_type = unassigned DNA
taaggtatgacg

SEQ ID NO: 150 - DNA, 21 bp, synthetic construct
  misc_feature 1..21: note = EME 44
  source 1..21: mol_type = other DNA
ctgacgtaagcgcttacgtac

SEQ ID NO: 151 - DNA, 21 bp, synthetic construct
  misc_feature 1..21: note = EME 45
  source 1..21: mol_type = other DNA
ctgacgtaagcgctgacgtac

SEQ ID NO: 152 - DNA, 21 bp, synthetic construct
  misc_feature 1..21: note = EME 46
  source 1..21: mol_type = other DNA
ctgacgtaagcgctgacgcac

SEQ ID NO: 153 - DNA, 16 bp, synthetic construct
  misc_feature 1..16: note = EME 47
  source 1..16: mol_type = other DNA
acgtaagcgattacgt

SEQ ID NO: 154 - DNA, 21 bp, synthetic construct
  misc_feature 1..21: note = EME 48
  source 1..21: mol_type = other DNA
ctgacgtaagcgattacgcac

SEQ ID NO: 155 - DNA, 21 bp, synthetic construct
  misc_feature 1..21: note = EME 49
  source 1..21: mol_type = other DNA
ctgacgtaagcgattacgtac

SEQ ID NO: 156 - DNA, 21 bp, synthetic construct
  misc_feature 1..21: note = EME 50
  source 1..21: mol_type = other DNA
ctgacgtaagggattacgtac

SEQ ID NO: 157 - DNA, 22 bp, synthetic construct
  misc_feature 1..22: note = EME 51
  source 1..22: mol_type = other DNA
aatgacgtaagcgcttacgcac

SEQ ID NO: 158 - DNA, 22 bp, synthetic construct
  misc_feature 1..22: note = EME 52
  source 1..22: mol_type = other DNA
aatgacgtaagcgctgacgcac

SEQ ID NO: 159 - DNA, 12 bp, synthetic construct
  misc_feature 1..12: note = EME 53
  source 1..12: mol_type = other DNA
cgtaaggtatga

SEQ ID NO: 160 - DNA, 12 bp, synthetic construct
  misc_feature 1..12: note = EME 54
  source 1..12: mol_type = other DNA
gtaaggtatgac

SEQ ID NO: 161 - DNA, 12 bp, synthetic construct
  misc_feature 1..12: note = EME 55
  source 1..12: mol_type = other DNA
gacgtaaggtat

SEQ ID NO: 162 - DNA, 13 bp, synthetic construct
  misc_feature 1..13: note = EME 56
  source 1..13: mol_type = other DNA
acgtaaggtatga

SEQ ID NO: 163 - DNA, 13 bp, synthetic construct
  misc_feature 1..13: note = EME 57
  source 1..13: mol_type = other DNA
cgtaaggtatgac

SEQ ID NO: 164 - DNA, 13 bp, synthetic construct
  misc_feature 1..13: note = EME 58
  source 1..13: mol_type = other DNA
gacgtaaggtatg

SEQ ID NO: 165 - DNA, 14 bp, synthetic construct
  misc_feature 1..14: note = EME 59
  source 1..14: mol_type = other DNA
acgtaaggtatgac

SEQ ID NO: 166 - DNA, 14 bp, synthetic construct
  misc_feature 1..14: note = EME 60
  source 1..14: mol_type = other DNA
gacgtaaggtatga

SEQ ID NO: 167 - DNA, 15 bp, synthetic construct
  misc_feature 1..15: note = EME 61
  source 1..15: mol_type = other DNA
gacgtaaggtatgac

SEQ ID NO: 168 - DNA, 11 bp, synthetic construct
  misc_feature 1..11: note = EME 62
  source 1..11: mol_type = other DNA
taagcgcttac

SEQ ID NO: 169 - DNA, 12 bp, synthetic construct
  misc_feature 1..12: note = EME 63
  source 1..12: mol_type = other DNA
gtaagcgcttac

SEQ ID NO: 170 - DNA, 12 bp, synthetic construct
  misc_feature 1..12: note = EME 64
  source 1..12: mol_type = other DNA
taagcgcttacg

SEQ ID NO: 171 - DNA, 14 bp, synthetic construct
  misc_feature 1..14: note = EME 65
  source 1..14: mol_type = other DNA
gtaagcgcttacgc

SEQ ID NO: 172 - DNA, 16 bp, synthetic construct
  misc_feature 1..16: note = EME 66
  source 1..16: mol_type = other DNA
aacgtaagcgcttacg

SEQ ID NO: 173 - DNA, 16 bp, synthetic construct
  misc_feature 1..16: note = EME 67
  source 1..16: mol_type = other DNA
acgtaagcgcttacga

SEQ ID NO: 174 - DNA, 16 bp, synthetic construct
  misc_feature 1..16: note = EME 68
  source 1..16: mol_type = other DNA
acgtaagcgcttacgg

SEQ ID NO: 175 - DNA, 436 bp, Cauliflower mosaic virus
  source 1..436: mol_type = unassigned DNA
catggagtcaaagattcaaatagaggacctaacagaactcgccgtaaagactggcgaacagttcatacagagtctcttacgactcaatgacaagaagaaaatcttcgtcaacatggtggagcacgacacgcttgtctactccaaaaatatcaaagatacagtctcagaagaccaaagggcaattgagacttttcaacaaagggtaatatccggaaacctcctcggattccattgcccagctatctgtcactttattgtgaagatagtggaaaaggaaggtggctcctacaaatgccatcattgcgataaaggaaaggccatcgttgaagatgcctctgccgacagtggtcccaaagatggacccccacccacgaggagcatcgtggaaaaagaagacgttccaaccacgtcttcaaagcaagtggattgatgtgat

SEQ ID NO: 176 - DNA, 280 bp, Citrus yellow mosaic virus
  source 1..280: mol_type = unassigned DNA
caattatggagcgtgatggacccccccgcaataatccaaagtttggtgtgcttttagtagtgcgtctttatggaccactactttattgtaataatcgatgctttttgtagtgcgctcttcgtgcgctctactttatgcttttgcttttgtaagtgcgctgtaagtgcgcctgtctttcttcagatgcttatcctttaagcatcttttgctttttgcgtggcatcctttagttcacaatttaaagaatgacgatggggcccaagatgtgcacccggttctc

SEQ ID NO: 177 - DNA, 293 bp, unidentified
  source 1..293: mol_type = unassigned DNA; note = Banana streak virus
gccagaagatagaagatatcctggacctgcaagatgtcagcaatgacgattgaaagattcccaggatagccggcggacgtggtggacccagtctaggtgcgatgcttagtcacgcacgatgactctgtcggaaggcatctttactttcggcaaactttaataatactttaggaaaagtattgtacaagttaggtgcagaatcaataatgcacccagctttagtcttgtctactgaattattgtgtcggttgcattattggatgcctgcgtgcaccctaagcaatccccggctc

SEQ ID NO: 178 - DNA, 202 bp, Figwort mosaic virus
  source 1..202: mol_type = unassigned DNA
atcgagcagctggcttgtggggaccagacaaaaaaggaatggtgcagaattgttaggcgcacctaccaaaagcatctttgcctttattgcaaagataaagcagattcctctagtacaagtggggaacaaaataacgtggaaaagagctgtcctgacagcccactcactaatgcgtatgacgaacgcagtgacgaccacaaaa

SEQ ID NO: 179 - DNA, 184 bp, Peanut chlorotic streak virus
  source 1..184: mol_type = unassigned DNA
caacgagatcatgagccaatcaaagaggagtgatgtagacctaaagcaataatggagccatgacgtaagggcttacgcccatacgaaataattaaaggctgatgtgacctgtcggtctctcagaacctttactttttatgtttggcgtgtatttttaaatttccacggcaatgacgatgtgacc

SEQ ID NO: 180 - DNA, 187 bp, Mirabilis mosaic virus
  source 1..187: mol_type = unassigned DNA
ccactaaaacattgctttgtcaaaagctaaaaaagatgatgcccgacagccacttgtgtgaagcatgagaagccggtccctccactaagaaaattagtgaagcatcttccagtggtccctccactcacagctcaatcagtgagcaacaggacgaaggaaatgacgtaagccatgacgtctaatccca

SEQ ID NO: 181 - DNA, 8964 bp, synthetic construct
  misc_feature 1..8964: note = PHP87078
  source 1..8964: mol_type = other DNA
gtttacccgccaatatatcctgtcaaacactgcggccgcacttgaccgcggatggagccggagctgtggtgaggccatcgacgggaggtgggggagaacacagtctcagtgttctttgtgagtccgcaaggtttttagcttttctgtattaattaaggttgctgttggctgtagaatacggtcgtggaagagctgtatcggtagctactacgtaagctattatatactggaagtctggagctcgtcgatctccggtcgtcttcctccatttctcctcgtcttgctttgactgctgctaccatttgcttctgttttctgatgaagcatgccatgtcggccaccagtgtttgtgtggtttttgcagggaatggctttcaagtgctgtgattgaatggccctcgtcgtcctcggctgagctcacatggacgcgtcatgtgagtgagatatatgatcatatgatgagtggggttcgggtgagtgcgtacttgaagtaggatcccgctttcactcattcattcattggcctttaaaccgggaaattttcgcgaggagatggagggaagcaagcagggtgacgagtgcagagtgccgcgagcgctttgtcaaaaggcaccgccgtaggcaaaaaaatcaatggccctgactgactcgatggtagtactactgtagagactagagagggttgctccccatatcttcgtgtgacttttactccagcattgcatttccgtcattgagacgttaattaatagcagctttcgggacagatgactgtggccatgtttcgtcacggccgcttcgtgccagctgggggtactatagtactgtgattttgttagtaaaaactttcattaggccaccattgacgaccgggccttcgcttttgctgcgctaattaaccatttcccggcgaccgaagggaacatgaacatgccccgacacatgagggcatgaggactagtgttctccctgtcgttcgttgacttgactagtgatagtttaaacgctcttcaactggaagagcggttactaccggttcactagctagctgctaatcgagctagttaccctatgaggtgacatgaagcgctcacggttactatgacggttagcttcacgactgttggtggcagtagcgtacgacttagctatagttccggacttacccttaagataacttcgtatagcatacattatacgaagttatgggcccacgcgtgaagagcggttaccagagctggtcacctttgtccaccaagatggaactgtcttcggccagaatggccatctggattcagcaggcctagaaggccatttatcgctatcaactttgtatagaaaagttgggccgagctcggtacggccagaatggcccggaccgggttaccaagcggccgcatcgagcagctggcttgtggggaccagacaaaaaaggaatggtgcagaattgttaggcgcacctaccaaaagcatctttgcctttattgcaaagataaagcagattcctctagtacaagtggggaacaaaataacgtggaaaagagctgtcctgacagcccactcactaatgcgtatgacgaacgcagtgacgaccacaaaactcgagcaacgagatcatgagccaatcaaagaggagtgatgtagacctaaagcaataatggagccatgacgtaagggcttacgcccatacgaaataattaaaggctgatgtgacctgtcggtctctcagaacctttactttttatgtttggcgtgtatttttaaatttccacggcaatgacgatgtgaccgtcgacccactaaaacattgctttgtcaaaagctaaaaaagatgatgcccgacagccacttgtgtgaagcatgagaagccggtccctccactaagaaaattagtgaagcatcttccagtggtccctccactcacagctcaatcagtgagcaacaggacgaaggaaatgacgtaagccatgacgtctaatcccagggcccggtgaccaatcgaattcttaccctagctccctgcggctgttacgcggtcccccatcaatcttctgttcttgcggttgtagcctgtgtaacagtgctagagtatgtatgataaataggttttaagtctgcttacatgacattttttattgtggaagagacatataaaaattagagagagtggttctcatgcaacggcggacggcccggtgctaaaagagcttcaagacaaaataatgaaacaggaagagagtagatttatctaagagccaactttattatatgaatgtgtttattgttggctttagatgatatggtaaggagttagagctaataatagataggctctattattattattattaattaaactcgctctaaggaggaaagtgggaggaagggacgaggacgaagactactggaagcatcgtgcatggatgatggatgtggtgtctcttaatgtaggtggccggaggatgtacgtgttaattgcgcgataagcactcagatccaaccgcaaactacctccacactgacacactgatagagagaaagagagacctccgacgactgccgccgcagatgagccacgtacgtatacgacgtctgccggccggctcaggctgccgccatcaccctgctcgaaagtcgcgttaggcggcgccagctacataggagtatctagtctagccagttagtatactactactgcgctgatgatgaattaactctgcatagatactgtacttgcctccctccaacacccaaccacctcctgctcggctcttaataacttggacacggatcgatgccatccaaggaagaacacgacgacgacgacggaacatccaccatgcaagcttgcatccatacgccgatacgcgtgcatccatccatccaccattatttccattttccaccgatcacacgtacacaggcctatttaaggagcgacatcccactgcaactctcctcaccactcatcaccagctagctctagcaaagcacttgccatctaccgaccgccgcattccaaacagcccgacgagctagcagagcggcaggcacctccctcctcaaggaacccatggcggccaatgcgggcggcggtggagcgggaggaggcagcggcagcggcagcgtggctgcgccggcggtgtgccgccccagcggctcgcggtggacgccgacgccggagcagatcaggatgctgaaggagctctactacggctgcggcatccggtcgcccagctcggagcagatccagcgcatcaccgccatgctgcggcagcacggcaagatcgagggcaagaacgtcttctactggttccagaaccacaaggcccgcgagcgccagaagcgccgcctcaccagcctcgacgtcaacgtgcccgccgccggcgcggccgacgccaccaccagccaactcggcgtcctctcgctgtcgtcgccgccgccttcaggcgcggcgcctccctcgcccaccctcggcttctacgccgccggcaatggcggcggatcggctgtgctgctggacacgagttccgactggggcagcagcggcgctgctatggccaccgagacatgcttcctgcaggactacatgggcgtgacggacacgggcagctcgtcgcagtggccacgcttctcgtcgtcggacacgataatggcggcggccgcggcgcgggcggcgacgacgcgggcgcccgagacgctccctctcttcccgacctgcggcgacgacggcggcagcggtagcagcagctacttgccgttctggggtgccgcgtccacaactgccggcgccacttcttccgttgcgatccaacagcaacaccagctgcaggagcagtacagcttttacagcaacagcaacagcacccagctggccggcaccggcaaccaagacgtatcggcaacagcagcagcagccgccgccctggagctgagcctcagctcatggtgctccccttaccctgctgcagggagtatgtgagagcaacgcgagctgccactgctcttcactgatgtctctggaatggaaggaggaggaagtgagaacagatcattcgacaaagcagcattagtccgttgatcggtggaagaccactcgtcagtgttgagttgaatgtttgatcaataaaatacggcaatgctgtaagggttgttttttatgccattgataatacactgtactgttcagttgttgaactctatttcttagccatgccaagtgcttttcttattttgaataacattacagcaaaaagttgaaagacaaaaaaaaaaacccccgaacagagtgctttgggtcccaagcttctttagactgtgttcggcgttccccctaaatttctccccctatatctcactcacttgtcacatcagcgttctctttccccctatatctccacgctctacagcagttccacctatatcaaacctctataccccaccacaacaatattatatactttcatcttcaactaactcatgtaccttccaatttttttctactaataattatttacgtgcacagaaacttagcaaggagagagagagcggggtcacccggtccgggcctagaaggccagcttcaagtttgtacaaaaaagcaggctccggccagaatggcccggaccgggttaccgaattcgagctcggtaccctgggatccgatatcgatgggccctggccgaagcttggtcacccggtccgggcctagaaggccgatctcccgggcacccagctttcttgtacaaagtggccgttaacggatcggccagaatggcccggaccgggttaccgaattcctgcccttaaggccaattgttcaagattcattcaacaattgaaacatctcccatgattaaatcagtataaggttgctatggtcttgcttgacaaagtttttttttgagggaatttcaactaaatttttgagtgaaactatcaaatactgattttaaaaaatttttataaaaggaagcgcagagataaaaggccatctatgctacaaaagtacccaaaaatgtaatcctaaagtatgaattgcattttttttttgtttggacgaaaggaaaggagtattaccacaagaatgatatcatcttcatatttagatcttttttgggtaaagcttgagattctctaaatatagagaaatcagaagaaaaaaaaaccgtgttttggtggttttgatttctagcctccacaataactttgacggcgtcgacaagtctaacggacaccaagcagcgaaccaccagcgccgagccaagcgaagcagacggccgagacgttgacaccttcggcgcggcatctctcgagagttccgctccggcgctccacctccaccgctggcggtttcttattccgttccgttccgcctcctgctctgctcctctccacaccacacggcacgaaaccgttacggcaccggcagcacccagcacgggagaggggattcctttcccaccgttccttccctttccgccccgccgctataaatagccagccccatccccagcttttttccccaatctcatctcctctctcctgttgttcggagcacacgcacaatccgatcgatccccaaatccccttcgtctctcctcgcgagcctcgtggatcccagcttcaaggtacggcgatcgatcatcccccctccttctctctaccttcttttctctagactacatcggatggcgatccatggttagggcctgctagtttcccttcctgttttgtcgatggctgcgaggcacaatagatctgatggcgttatgacggctaacttgtcatgttgttgcgatttatagtccctttaggagatcagtttaatttctcggatggttcgagatcggtggtccatggttagtaccctaagatccgcgctgttagggttcgtagatggaggcgacctgttctgattgttaacttgtcagtacctgggaaatcctgggatggttctagctcgtccgcagatgagatcgatttcatgatcctctgtatcttgtttcgttgcctaggttccgtctaatctatccgtggtatgatgtagatgttttgatcgtgctaactacgtcttgtaaagttaattgtcaggtcataatttttagcatgcctttttttttgtttggttttgtctaattgggctgtcgttctagatcagagtagaagactgttccaaactacctgctggatttattgaacttggatctgtatgtgtgtcacatatcttcataaattcatgattaagatggattgaaatatcttttatctttttggtatggatagttctatatgttggtgtggctttgttagatgtatacatgcttagatacatgaagcaacgtgctgctactgtttagtaattgctgttcatttgtctaataaacagataaggatatgtatttatgttgctgttggttttgctggtactttgttggatacaaatgcttcaatacagaaaacagcatgctgctacgatttaccatttatctaatcttatcatatgtctaatctaataaacaaacatgcttttaaattatcttcatatgcttggatgatggcatacacagcggctatgtgtggttttttaaatacccagcatcatgggcatgcatgacactgctttaatatgctttttatttgcttgagactgtttcttttgtttatactgaccctttagttcggtgactcttctgcaggtcgactttaacttagcctaggatccatggcccagtccaagcacggcctgaccaaggagatgaccatgaagtaccgcatggagggctgcgtggacggccacaagttcgtgatcaccggcgagggcatcggctaccccttcaagggcaagcaggccatcaacctgtgcgtggtggagggcggccccttgcccttcgccgaggacatcttgtccgccgccttcatgtacggcaaccgcgtgttcaccgagtacccccaggacatcgtcgactacttcaagaactcctgccccgccggctacacctgggaccgctccttcctgttcgaggacggcgccgtgtgcatctgcaacgccgacatcaccgtgagcgtggaggagaactgcatgtaccacgagtccaagttctacggcgtgaacttccccgccgacggccccgtgatgaagaagatgaccgacaactgggagccctcctgcgagaagatcatccccgtgcccaagcagggcatcttgaagggcgacgtgagcatgtacctgctgctgaaggacggtggccgcttgcgctgccagttcgacaccgtgtacaaggccaagtccgtgccccgcaagatgcccgactggcacttcatccagcacaagctgacccgcgaggaccgcagcgacgccaagaaccagaagtggcacctgaccgagcacgccatcgcctccggctccgccttgccctccggactcagatctcgatagggtaccaatggccagttaacagatccagctgctgctgttctagggttcacaagtctgcctatttgtcttccccaatggagctatggttgtctggtctggtccttggtcgtgtcccgtttcattgtgtactatttacctgtaatgtgtatccttaagtctggtttgatggtgtctgaaacgttttgctgtggtagagcagcatggaagaactataatgaataagtgatccctaatcattgtgtccaaattttgcttctgctatacccttttgtgctgtttcttatgttttgcttaaaaatttgatctgacaaacaaatttgtctaaattatgctcttgttctgactgtgtactgtacacatttgtattgctaccggtttggcacatagttttctctttgattgcagatcaaacccttctgattgcagattgcttggctatggctgatgtgctcactgttcttctttagcttgtatattgctgatggtggcttggctacggctgaaaaagttgctgctgcgccgacttggcaactgttgctccagtaatgctttgtcctctcttcctagccgccgacttggcacttggcagctgttgctcctgtaatgcgttgttatctcttatctcttgagatgtactatgattttgaggctgtttgacttgtgccagattgccagtgctgatgctatattatctcaggtttttatgctagtatatgttttactgtgtgctgcctgtgtcgagttacgtaatctattgaaccgctatgcgtgttgatgccctgttgttgcttgccagattgatgcccctgttgcttgcagcttgcaagctgtagtgaaatcctaaaattcgaaaccaaatctattctgaacttttgaagatctgtgatgtccggaagaaaagattcaaacagataaacgggactctccagaatctataaaataaatgatcgacaaacgctttgctttggtaggcttcctagttagttagcggaccgaagcttcggtccgggcctagaaggccagcttcggccgccccgggcaactttattatacaaagttgatagataaatcagatatctggttcctaaggacccggcggaccgattaaactgattcggtccgacgcgttacctaataacttcgtatagcatacattatacgaagttattagctaactaactagtaagcttaagccatgggtcgacggatccgttacctgagctgattccgatgacttcgtaggttcctagctcaagccgctcgtgtccaagcgtcacttacgattagctaatgattacggcatctaggaccgactagctaactaactagtacgtacgcgccgactagctagctaaggtaccgagctcgaattcattccgattaatcgtggcctcttgctcttcaggatgaagagctatgtttaaacgtgcaagcgctactagacaattcagtacattaaaaacgtccgcaatgtgttattaagttgtctaagcgtcaatttgtttacaccacaatatatcctgcca

SEQ ID NO: 182 - DNA, 8870 bp, synthetic construct
  misc_feature 1..8870: note = PHP88158
  source 1..8870: mol_type = other DNA
gtttacccgccaatatatcctgtcaaacactgcggccgcacttgaccgcggatggagccggagctgtggtgaggccatcgacgggaggtgggggagaacacagtctcagtgttctttgtgagtccgcaaggtttttagcttttctgtattaattaaggttgctgttggctgtagaatacggtcgtggaagagctgtatcggtagctactacgtaagctattatatactggaagtctggagctcgtcgatctccggtcgtcttcctccatttctcctcgtcttgctttgactgctgctaccatttgcttctgttttctgatgaagcatgccatgtcggccaccagtgtttgtgtggtttttgcagggaatggctttcaagtgctgtgattgaatggccctcgtcgtcctcggctgagctcacatggacgcgtcatgtgagtgagatatatgatcatatgatgagtggggttcgggtgagtgcgtacttgaagtaggatcccgctttcactcattcattcattggcctttaaaccgggaaattttcgcgaggagatggagggaagcaagcagggtgacgagtgcagagtgccgcgagcgctttgtcaaaaggcaccgccgtaggcaaaaaaatcaatggccctgactgactcgatggtagtactactgtagagactagagagggttgctccccatatcttcgtgtgacttttactccagcattgcatttccgtcattgagacgttaattaatagcagctttcgggacagatgactgtggccatgtttcgtcacggccgcttcgtgccagctgggggtactatagtactgtgattttgttagtaaaaactttcattaggccaccattgacgaccgggccttcgcttttgctgcgctaattaaccatttcccggcgaccgaagggaacatgaacatgccccgacacatgagggcatgaggactagtgttctccctgtcgttcgttgacttgactagtgatagtttaaacgctcttcaactggaagagcggttactaccggttcactagctagctgctaatcgagctagttaccctatgaggtgacatgaagcgctcacggttactatgacggttagcttcacgactgttggtggcagtagcgtacgacttagctatagttccggacttacccttaagataacttcgtatagcatacattatacgaagttatgggcccacgcgtgaagagcggttaccagagctggtcacctttgtccaccaagatggaactgtcttcggccagaatggccatctggattcagcaggcctagaaggccatttatcgctatcaactttgtatagaaaagttgggccgagctcggtacggccagaatggcccggaccgggttaccaagcggccgcatcgagcagctggcttgtggggaccagacaaaaaaggaatggtgcagaattgttaggcgcacctaccaaaagcatctttgcctttattgcaaagataaagcagattcctctagtacaagtggggaacaaaataacgtggaaaagagctgtcctgacagcccactcactaatgcgtatgacgaacgcagtgacgaccacaaaactcgagcaacgagatcatgagccaatcaaagaggagtgatgtagacctaaagcaataatggagccatgacgtaagggcttacgcccatacgaaataattaaaggctgatgtgacctgtcggtctctcagaacctttactttttatgtttggcgtgtatttttaaatttccacggcaatgacgatgtgaccgtcgacccactaaaacattgctttgtcaaaagctaaaaaagatgatgcccgacagccacttgtgtgaagcatgagaagccggtccctccactaagaaaattagtgaagcatcttccagtggtccctccactcacagctcaatcagtgagcaacaggacgaaggaaatgacgtaagccatgacgtctaatcccagggcccggtgaccaatcgaattcttaccctagctccctgcggctgttacgcggtcccccatcaatcttctgttcttgcggttgtagcctgtgtaacagtgctagagtatgtatgataaataggttttaagtctgcttacatgacattttttattgtggaagagacatataaaaattagagagagtggttctcatgcaacggcggacggcccggtgctaaaagagcttcaagacaaaataatgaaacaggaagagagtagatttatctaagagccaactttattatatgaatgtgtttattgttggctttagatgatatggtaaggagttagagctaataatagataggctctattattattattattaattaaactcgctctaaggaggaaagtgggaggaagggacgaggacgaagactactggaagcatcgtgcatggatgatggatgtggtgtctcttaatgtaggtggccggaggatgtacgtgttaattgcgcgataagcactcagatccaaccgcaaactacctccacactgacacactgatagagagaaagagagacctccgacgactgccgccgcagatgagccacgtacgtatacgacgtctgccggccggctcaggctgccgccatcaccctgctcgaaagtcgcgttaggcggcgccagctacataggagtatctagtctagccagttagtatactactactgcgctgatgatgaattaactctgcatagatactgtacttgcctccctccaacacccaaccacctcctgctcggctcttaataacttggacacggatcgatgccatccaaggaagaacacgacgacgacgacggaacatccaccatgcaagcttgcatccatacgccgatacgcgtgcatccatccatccaccattatttccattttccaacgtaagcgcttacgcccgatcacacgtacacaggcctatttaaggagcgacatcccactgcaactctcctcaccactcatcaccagctagctctagcaaagcacttgccatctaccgaccgccgcattccaaacagcccgacgagctagcagagcggcaggcacctccctcctcaaggaacccatggcggccaatgcgggcggcggtggagcgggaggaggcagcggcagcggcagcgtggctgcgccggcggtgtgccgccccagcggctcgcggtggacgccgacgccggagcagatcaggatgctgaaggagctctactacggctgcggcatccggtcgcccagctcggagcagatccagcgcatcaccgccatgctgcggcagcacggcaagatcgagggcaagaacgtcttctactggttccagaaccacaaggcccgcgagcgccagaagcgccgcctcaccagcctcgacgtcaacgtgcccgccgccggcgcggccgacgccaccaccagccaactcggcgtcctctcgctgtcgtcgccgccgccttcaggcgcggcgcctccctcgcccaccctcggcttctacgccgccggcaatggcggcggatcggctgtgctgctggacacgagttccgactggggcagcagcggcgctgctatggccaccgagacatgcttcctgcaggactacatgggcgtgacggacacgggcagctcgtcgcagtggccacgcttctcgtcgtcggacacgataatggcggcggccgcggcgcgggcggcgacgacgcgggcgcccgagacgctccctctcttcccgacctgcggcgacgacggcggcagcggtagcagcagctacttgccgttctggggtgccgcgtccacaactgccggcgccacttcttccgttgcgatccaacagcaacaccagctgcaggagcagtacagcttttacagcaacagcaacagcacccagctggccggcaccggcaaccaagacgtatcggcaacagcagcagcagccgccgccctggagctgagcctcagctcatggtgctccccttaccctgctgcagggagtatgtgagagcaacgcgagctgccactgctcttcactgatgtctctggaatggaaggaggaggaagtgagaacagatcattcgacaaagcagcattagtccgttgatcggtggaagaccactcgtcagtgttgagttgaatgtttgatcaataaaatacggcaatgctgtaagggttgttttttatgccattgataatacactgtactgttcagttgttgaactctatttcttagccatgccaagtgcttttcttattttgaataacattacagcaaaaagttgaaagacaaaaaaaaaaacccccgaacagagtgctttgggtcccaagcttctttagactgtgttcggcgttccccctaaatttctccccctatatctcactcacttgtcacatcagcgttctctttccccctatatctccacgctctacagcagttccacctatatcaaacctctataccccaccacaacaatattatatactttcatcttcaactaactcatgtaccttccaatttttttctactaataattatttacgtgcacagaaacttagcaaggagagagagagcggggtcacccggtccgggcctagaaggccagcttcaagtttgtacaaaaaagcaggctccggccagaatggcccggaccgggttaccgaattcgagctcggtaccctgggatccgatatcgatgggccctggccgaagcttggtcacccggtccgggcctagaaggccgatctcccgggcacccagctttcttgtacaaagtggccgttaacggatcggccagaatggcccggaccgaagccgaggccggccacactgatagtttaaactgaaggcgggaaacgacaatctgatcatgagcggagaattaagggagtcacgttatgacccccgccgatgacgcgggacaagccgttttacgtttggaactgacagaaccgcaacgattgaaggagccactcagccgcgggtttctggagtttaatgagctaagcacatacgtcagaaaccattattgcgcgttcaaaagtcgcctaaggtcactatcagctagcaaatatttcttgtcaaaaatgctccactgacgttccataaattcccctcggtatccaattagagtctcatattcactctcccggcggatctcgactctagaggatcgctcaggaaggccgctgagatagagccatggggaggagggcgtgttgcgcgaaggaaggcgttaagagaggggcgtggacgagcaaggaggacgatgccttggccgcctacgtcaaggcccacggcgaaggcaaatggagggaagtgccccagaaagccggtttgcgtcggtgcggcaagagctgccggctgcggtggctgaactacctccggcccaacatcaggcgcggcaacatctcctacgacgaggaggatctcatcatccgcctccacaggctcctcggcaacaggtggtcgctgattgcaggcaggctgcctggccgaacagacaatgaaatcaagaactactggaacagcacgctgggccggagggcaggcgccggcgccggcgccggcggcagatccacgatggcgctttcagcttcccgagttcagcaggcggaagaactgctgcaacgacctgctgagaggcagctgatgaggagccagcttgctgcagccgccaggagcatcaactggagctacgccctcttctggtccatttcagacactcaaccaggggtgctgacgtggacggacgggttctacaacggcgaggtgaagacgcggaagatttccaactccgtggagctgacatccgaccagctcgtcatgcagaggagcgaccagctccgggagctctacgaggccctcctgtcgggcgagggcgaccgccgcgctgcgcctgcgcggccggccggctctctgtcgccggaggacctcggcgacaccgagtggtactacgtggtgtccatgacctacgccttccggccaggccaagggttgcccggcaggagtttcgcgagcgacgagcatgtctggctgtgcaacgcgcacctcgccggcagcaaagccttcccccgcgcgctcctcgccaagagcgcgtccattcagtcaatcctctgcatcccggttatgggcggcgtgcttgagcttggtacaactgacacggtgccggaggccccggacttggtcagccgagcaaccgcggctttctgggagccgcagtgcccgagctccagcccgtcaggacgagcaaacgagacgggcgaggccgcagcagacgacggcacgtttgcgttcgaggaactcgaccacaataatggcatggacgacatagaggcgatgaccgccgccgggggacacgggcaggaggaggagctaagactaagagaagccgaggccctgtcagacgacgcaagcctggagcacatcaccaaggagatcgaggagttctacagcctctgcgacgaaatggacctgcaggcgctaccactaccgctagaggacggctggaccgtggacgcgtccaatttcgaggtcccctgctcttccccgcagccagcgccgcctccggtggatagggctaccgctaacgtcgccgccgacgcctcaagggcacccgtctacggctctcgcgcgacgagtttcatggcttggacgaggtcctcgcagcagtcgtcgtgctccgacgacgcggcgcccgcagcagtagtgccggccatcgaggagccgcagagattgctgaagaaagtggtggccggcggcggtgcttgggagagctgtggcggcgcgacgggagcagcacaggaaatgagtggcactggcaccaagaaccacgtcatgtcggagcgaaagcgacgagagaagctcaacgagatgttcctcgtcctcaagtcactgcttccgtccattcacagggtgaacaaagcgtcgatcctcgccgaaacgatagcctacctcaaggagcttcagagaagggtgcaagagctggagtccagtagggaacctgcgtcgcgcccatccgaaacgacgacaaggctaataacaaggccctcccgtggcaataatgagagtgtgaggaaggaggtctgcgcgggctccaagaggaagagcccagagctcggcagagacgacgtggagcgccccccggtcctcacgatggacgccggcaccagcaacgtcaccgtcaccgtctcggacaaggatgtgctcctggaggtgcagtgccggtgggaggagctcctgatgacgcgagtgttcgacgccatcaagagcctccatttggacgtcctctcggttcaggcttcagcgccagatggcttcatggggcttaagatacgagctcagtttgctggctccggtgccgtcgtgccctggatgatcagcgaggctcttcgcaaagctatagggaacccctgggtcgtcgtcgcgccggacaccggctcgcacgccaccccggccgcgacgtcgggcgcctgcgagacgggccagaatagcgccgctcatcgcgcggaccccgactcagccgggacgacgacgacctcggcggcggcggtgtgggcgcccaaggccgtgcggtgcacgggcggactcttcttcttccaccgggacacgacgccggcgcacgcgggcgagacggcgacgccaatggccggtggaggtggaggaggaggaggagaagcagggtcgtcggacgactgcagctcggcggcgtcggtatcgcttcgcgtcggaagccacgacgagccgtgcttctccggcgacggtgacggcgactggatggacgacgtgagggccctggcgtcgtttctggagtccgacgaggactggctccgctgtcagacggccgggcagcttgcgtagtggccaggtaccactaactatctatactgtaataatgttgtatagccgccggatagctagctagtttagtcattcagcggcgatgggtaataataaagtgtcatccatccatcaccatgcgtggcaacgtgagcaatgacctgattgaacaaattgaaatgaaaagaagaaatatgttatatgtcaacgagatttcctcataatgccactgacgacgtgtgtccaagaaatgtatcagtgatacgtatattcacaatttttttatgacttatactcacaatttgtttttttactacttatactcacaatttgttgtgcgtaccataacaatttcgatcgaatatatatcagaaagttgacgaaagtaagctcactcaaaaagttaaatgggctgcggaagctgcgtcaggcccaagttttggctattctatccggtatccacgattttgatggctgagggacatatgttcgcttaagcttggcgcgccggtcacccggtccgggcctagaaggccagcttcggccgccccgggcaactttattatacaaagttgatagataaatcagatatctggttcctaaggacccggcggaccgattaaactgattcggtccgacgcgttacctaataacttcgtatagcatacattatacgaagttattagctaactaactagtaagcttaagccatgggtcgacggatccgttacctgagctgattccgatgacttcgtaggttcctagctcaagccgctcgtgtccaagcgtcacttacgattagctaatgattacggcatctaggaccgactagctaactaactagtacgtacgcgccgactagctagctaaggtaccgagctcgaattcattccgattaatcgtggcctcttgctcttcaggatgaagagctatgtttaaacgtgcaagcgctactagacaattcagtacattaaaaacgtccgcaatgtgttattaagttgtctaagcgtcaatttgtttacaccacaatatatcctgcca

SEQ ID NO: 183 - DNA, 7799 bp, synthetic construct
  misc_feature 1..7799: note = PHP86491
  source 1..7799: mol_type = other DNA
gtttacccgccaatatatcctgtcaaacactgatagtttaaactgaaggcgggaaacgacaatctgatcatgagcggagaattaagggagtcacgttatgacccccgccgatgacgcgggacaagccgttttacgtttggaactgacagaaccgcaacgttgaaggagccactcagcaagctggtacgattgtaatacgactcactatagggcgaattgagcgctgtttaaacgctcttcaactggaagagcggttacgctgtttaaacgctcttcaactggaagagcggttactaccggttcactagctagctgctaaggttaccagagctggtcacctttgtccaccaacttattaagtatctagttgaagacacgttcttcttcacgtaagaagacactcagtagtcttcggccagaatggcctcttgattcagcgggcctagaaggccggatcactgactagctaatttaaatcctgaggatctggtcttcctaaggacccgggatatcggaccgattaaactttaattcggtccgataacttcgtatagcatacattatacgaagttatatgcatacgcgtcttaagtcgatcgctatcaactttgtatagaaaagttgggccgaattcctgcccttaaggccaattgttcaagattcattcaacaattgaaacatctcccatgattaaatcagtataaggttgctatggtcttgcttgacaaagtttttttttgagggaatttcaactaaatttttgagtgaaactatcaaatactgattttaaaaaatttttataaaaggaagcgcagagataaaaggccatctatgctacaaaagtacccaaaaatgtaatcctaaagtatgaattgcattttttttttgtttggacgaaaggaaaggagtattaccacaagaatgatatcatcttcatatttagatcttttttgggtaaagcttgagattctctaaatatagagaaatcagaagaaaaaaaaaccgtgttttggtggttttgatttctagcctccacaataactttgacggcgtcgacaagtctaacggacaccaagcagcgaaccaccagcgccgagccaagcgaagcagacggccgagacgttgacaccttcggcgcggcatctctcgagagttccgctccggcgctccacctccaccgctggcggtttcttattccgttccgttccgcctcctgctctgctcctctccacaccacacggcacgaaaccgttacggcaccggcagcacccagcacgggagaggggattcctttcccaccgttccttccctttccgccccgccgctataaatagccagccccatccccagcttttttccccaatctcatctcctctctcctgttgttcggagcacacgcacaatccgatcgatccccaaatccccttcgtctctcctcgcgagcctcgtggatcccagcttcaaggtacggcgatcgatcatcccccctccttctctctaccttcttttctctagactacatcggatggcgatccatggttagggcctgctagtttcccttcctgttttgtcgatggctgcgaggcacaatagatctgatggcgttatgacggctaacttgtcatgttgttgcgatttatagtccctttaggagatcagtttaatttctcggatggttcgagatcggtggtccatggttagtaccctaagatccgcgctgttagggttcgtagatggaggcgacctgttctgattgttaacttgtcagtacctgggaaatcctgggatggttctagctcgtccgcagatgagatcgatttcatgatcctctgtatcttgtttcgttgcctaggttccgtctaatctatccgtggtatgatgtagatgttttgatcgtgctaactacgtcttgtaaagttaattgtcaggtcataatttttagcatgcctttttttttgtttggttttgtctaattgggctgtcgttctagatcagagtagaagactgttccaaactacctgctggatttattgaacttggatctgtatgtgtgtcacatatcttcataaattcatgattaagatggattgaaatatcttttatctttttggtatggatagttctatatgttggtgtggctttgttagatgtatacatgcttagatacatgaagcaacgtgctgctactgtttagtaattgctgttcatttgtctaataaacagataaggatatgtatttatgttgctgttggttttgctggtactttgttggatacaaatgcttcaatacagaaaacagcatgctgctacgatttaccatttatctaatcttatcatatgtctaatctaataaacaaacatgcttttaaattatcttcatatgcttggatgatggcatacacagcggctatgtgtggttttttaaatacccagcatcatgggcatgcatgacactgctttaatatgctttttatttgcttgagactgtttcttttgtttatactgaccctttagttcggtgactcttctgcaggtcgactttaacttagcctaggatccatggcccagtccaagcacggcctgaccaaggagatgaccatgaagtaccgcatggagggctgcgtggacggccacaagttcgtgatcaccggcgagggcatcggctaccccttcaagggcaagcaggccatcaacctgtgcgtggtggagggcggccccttgcccttcgccgaggacatcttgtccgccgccttcatgtacggcaaccgcgtgttcaccgagtacccccaggacatcgtcgactacttcaagaactcctgccccgccggctacacctgggaccgctccttcctgttcgaggacggcgccgtgtgcatctgcaacgccgacatcaccgtgagcgtggaggagaactgcatgtaccacgagtccaagttctacggcgtgaacttccccgccgacggccccgtgatgaagaagatgaccgacaactgggagccctcctgcgagaagatcatccccgtgcccaagcagggcatcttgaagggcgacgtgagcatgtacctgctgctgaaggacggtggccgcttgcgctgccagttcgacaccgtgtacaaggccaagtccgtgccccgcaagatgcccgactggcacttcatccagcacaagctgacccgcgaggaccgcagcgacgccaagaaccagaagtggcacctgaccgagcacgccatcgcctccggctccgccttgccctccggactcagatctcgatagggtaccaatggccagttaacagatccagctgctgctgttctagggttcacaagtctgcctatttgtcttccccaatggagctatggttgtctggtctggtccttggtcgtgtcccgtttcattgtgtactatttacctgtaatgtgtatccttaagtctggtttgatggtgtctgaaacgttttgctgtggtagagcagcatggaagaactataatgaataagtgatccctaatcattgtgtccaaattttgcttctgctatacccttttgtgctgtttcttatgttttgcttaaaaatttgatctgacaaacaaatttgtctaaattatgctcttgttctgactgtgtactgtacacatttgtattgctaccggtttggcacatagttttctctttgattgcagatcaaacccttctgattgcagattgcttggctatggctgatgtgctcactgttcttctttagcttgtatattgctgatggtggcttggctacggctgaaaaagttgctgctgcgccgacttggcaactgttgctccagtaatgctttgtcctctcttcctagccgccgacttggcacttggcagctgttgctcctgtaatgcgttgttatctcttatctcttgagatgtactatgattttgaggctgtttgacttgtgccagattgccagtgctgatgctatattatctcaggtttttatgctagtatatgttttactgtgtgctgcctgtgtcgagttacgtaatctattgaaccgctatgcgtgttgatgccctgttgttgcttgccagattgatgcccctgttgcttgcagcttgcaagctgtagtgaaatcctaaaattcgaaaccaaatctattctgaacttttgaagatctgtgatgtccggaagaaaagattcaaacagataaacgggactctccagaatctataaaataaatgatcgacaaacgctttgctttggtaggcttcctagttagttagcggaccgaagcttcggtccgggcctagaaggccagcttcggccgccccgggcaactttattatacaaagttgatagatcgaataacttcgtatagcatacattatacgaagttatacctggtggcgccgctaggggctgcaggaattcgatatcaagcttatcgataccgtcgacctcgagggggggcccggtaccctgggatctgcccttactttaacgcctctaaccaacacccctttatctttataaggaacaataaacagaatttgccccactgttctaaatcacctaataatatccccagctaaaaacaataaaggtttcctagaattaagacaagcatgactgttcctccaggagggtttggaacattgttgcagtcttgcagatacgggcgaagggtgagaaacagagcggagggctggaggtgacctcggtagtcgacgccggagttgagcttgacaacgacggggcggcccctgatggacttgaggaagtccgatggcgtcttcaccgtcccgccggcgcccgaggcgggcctgtcgctgccgccgccgccgctgctcatcttgcgcgctgtgcccccggcggtgtccctgtgttgcggatcgcgggtgggccaggtggatgcgagggcgacccgtttggactccggccggagccgccggatccctggtcggtgtcagtgccgtttactctgggccccacgtgtcagtaccgtctgtagatgacaacaacccgtcgtccacagtcatgtccaaaatatcctttcttcttttttttcgattcggatatctatcttccttttttttttccaaaaatcttcttgacgcaccagcgcgcacgtttgtggtaaacgccgacacgtcggtcccacgtcgatagaccccacccaccagtgagtagcgtgtacgtattcgggggtgacggacgtgtcgccgtcgtcttgctagtcccattcccatctgagccacacatctctgaacaaaaaaaaggagggaggcctccacgcacatccccctccgtgccacccgccccaaaccctcgcgccgcctccgagacagccgccgcaaccatggccaccgccgccgccgcgtctaccgcgctcactggcgccactaccgctgcgcccaaggcgaggcgccgggcgcacctcctggccacccgccgcgccctcgccgcgcccatcaggtgctcagcggcgtcacccgccatgccgatggctcccccggccaccccgctccggccgtggggccccaccgagccccgcaagggtgctgacatcctcgtcgagtccctcgagcgctgcggcgtccgcgacgtcttcgcctaccccggcggcgcgtccatggagatccaccaggcactcacccgctcccccgtcatcgccaaccacctcttccgccacgagcaaggggaggcctttgccgcctccggctacgcgcgctcctcgggccgcgtcggcgtctgcatcgccacctccggccccggcgccaccaacctagtctccgcgctcgccgacgcgctgctcgattccgtccccatggtcgccatcacgggacaggtggcgcgacgcatgattggcaccgacgccttccaggagacgcccatcgtcgaggtcacccgctccatcaccaagcacaactacctggtcctcgacgtcgacgacatcccccgcgtcgtgcaggaggctttcttcctcgcctcctctggtcgaccagggccggtgcttgtcgacatccccaaggacatccagcagcagatggcggtgcctgtctgggacaagcccatgagtctgcctgggtacattgcgcgccttcccaagccccctgcgactgagttgcttgagcaggtgctgcgtcttgttggtgaatcgcggcgccctgttctttatgtgggcggtggctgcgcagcatctggtgaggagttgcgacgctttgtggagctgactggaatcccggtcacaactactcttatgggcctcggcaacttccccagcgacgacccactgtctctgcgcatgctaggtatgcatgggacggtgtatgcaaattatgcagtggataaggccgatctgttgcttgcacttggtgtgcggtttgatgatcgcgtgacagggaagattgaggcttttgcaagcagggctaagattgtgcacgttgatattgatccggctgagattggcaagaacaagcagccacatgtgtccatctgtgcagatgttaagcttgctttgcagggcatgaatgctcttcttgaaggaagcacatcaaagaagagctttgactttggctcatggaacgatgagttggatcagcagaagagggaattcccccttgggtataaaacatctaatgaggagatccagccacaatatgctattcaggttcttgatgagctgacgaaaggcgaggccatcatcggcacaggtgttgggcagcaccagatgtgggcggcacagtactacacttacaagcggccaaggcagtggttgtcttcagctggtcttggggctatgggatttggtttgccggctgctgctggtgcttctgtggcaaacccaggtgtcactgttgttgacatcgatggagatggtagctttctcatgaacgttcaggagctagctatgatccgaattgagaacctcccagtgaaggtctttgtgctaaacaaccagcacctggggatggtggtgcagttggaggacaggttctataaggccaacagagcgcacacatacttgggaaacccagagaatgaaagtgagatatatccagatttcgtgacgatcgccaaagggttcaacattccagcggtccgtgtgacaaagaagaacgaagtccgcgcagcgataaagaagatgctcgagactccagggccgtacctcttggatataatcgtcccacaccaggagcatgtgttgcctatgatccctagtggtggggctttcaaggatatgatcctggatggtgatggcaggactgtgtactgactagctagtcagttaacctagacttgtccatcttctggattggccaacttaattaatgtatgaaataaaaggatgcacacatagtgacatgctaatcactataatgtgggcatcaaagttgtgtgttatgtgtaattactagttatctgaataaaagagaaagagatcatccatatttcttatcctaaatgaatgtcacgtgtctttataattctttgatgaaccagatgcatttcattaaccaaatccatatacatataaatattaatcatatataattaatatcaattgggttagcaaaacaaatctagtctaggtgtgttttgcgaatgcggccgcctgcagagttaacggcgcgccgactagctagctaaggtaccgagctcgaattcattccgattaatcgtggcctcttgctcttcaggatgaagagctatgtttaaacgtgcaagcgctactagacaattcagtacattaaaaacgtccgcaatgtgttattaagttgtctaagcgtcaatttgtttacaccacaatatatcctgcca

SEQ ID NO: 184 - DNA, 28390 bp, synthetic construct
  misc_feature 1..28390: note = PHP71539
  source 1..28390: mol_type = other DNA
gacccgcgaggtttctcgcttcaattgaaatcataaagaagcaattgaaaattttcgagtaaccgaccctcccgataatcttcaacataaaacaacgcacttcttccaacgggagaggcggtgttagttgcgagctaaggagataaggtatgcttaagagatcggggtcgctttctcttgccttgatggtctccttctgttcgtcgagccttgccacgccactctcatctgctgagtttgaccatgttgctcgcaagtgtgccccatcagttgcgacatctacgcttgcggcgatagctaaggtggagagtcgctttgatcctttagcgattcatgacaacacgaccggcgaaacgcttcactggcaagatcacagccaagcaacccaagtcgtcaggcaccgtctcgatgcacggcattcgctggatgttggcctcatgcaaataaactctcgaaatttttctatgctcggtctgacacctgacggtgcgctccaggcgtgcacatcattatctgccgctgcaaacatgctgaaaagtcgttatgcaggcggcgaaacgattgacgagaagcaatttgcgcttcgtcgggcgatctccgcttacaacaccggtaatttcatcggcggttttgcaaacggctacgtgcgaaaagttgaaacagctgctcaatcgctggtgcccgcgttaatcgagcctccaaaagacgatcacgaggcgctaaaatccgaagagacgtgggatgtttgggggtcatatcagcgccgctcgcaggaggatggcgctggcggtttaatcgctccgccaccgccacaccaggacaacggcaaatccgcagacgacaatcaagtcttattcgacttatactaaggaggtgcgcattgatgcgatgctttgagagataccgtttacatctaaatcgcctctcgctctcgaatgcgatgatgcgcgtgatatcgagctgcgccccaagcttgtgcggtgcaattgcatggagcatttcctcatccggacccgccgcagcgcaatctgcgggtggcggcactgaccccgccacaatggttaacaatatatgcacgtttatccttggtccgttcggccagtcactcgctgttctcggcattgtcgctatcgggatctcctggatgttcgggcgggcttcgcttgggctggttgccggcgtcgtcggcggcattgttatcatgtttggggcgagcttcctcggccaaacgctcactggcggtagttgatggctgatcgtttggaagaatcgaccctttacctcgcagccacacggcccgcattgtttcttggggtgccactgacattggcagggttattcatgatgttcgccggctttgtcatcgttatcgttcagaacccgctctacgaagtcgttctcgtgccgttatggtttgcagcccggctcatcgtggagcgagactacaatgcggcgagcgtcgtcctgctatttttgcggaccgcgggaagaagcattgatagtgcagtttgggggggcgctactgttagcccaaatccaattagggttcccccacgagggagaggaatggtgtgatgctcggcgcgagtggaacgaccgaaagatccggtgagatctatctcccttatattggccacctcagcgaccatatcgtccttcttgaagacggatcgatcatgaccattgcgagaattgatggcgttgcattcgagcttgaggaaactgaaatgcgcaatgcgcgttgtcgtgcgttcaacacgctgttgcgcaatatcgctgatgatcatgtgtcaatatatgctcacctcgtacgtcatgccgacgtgccatcatcggcgccgcgacacttccgtagtgttttcgccgctagcctgaacgaagcttttgaacagcgcgtgctctccggccaactcctccgcaatgaacacttccttacgttgattgtctacccacaggcggctttagggaaggtaaagaggaggttcaccaagctaagcggaaaaagggaaaacgatctcacgggccagatcaggaacatggaagatctttggcatgttgtcgctggctctcttaaagcgtatggcctgcatcgtcttggcatccgcgagaagcagggtgtgctcttcaccgaaattggcgaagcgctacggttgatcatgactggtcggttcacaccggttccggtcgtcagcggctcactcggcgcttcgatttataccgacagagtcatttgcggcaagcgaggactcgagatcagaacgccaaaagacagttacgttggatccatctattcgtttcgcgaataccctgcaaaaacacggccgggcatgctcaacgcgctgctatccctcgattttccacttgttctcacgcagagtttttcgttcctgactcgcccgcaagcgcacgcgaaacttagcctcaaatcgagccagatgctgagttccggcgataaagccgtgactcaaatcggcaaattatccgaggctgaggacgcacttgcgagcaacgaattcgttatgggctcacatcatttgagcctttgcgtctatgcagacgatctcaatagtcttggggacaggggcgcgcgggctcggacacgaatggcggatgcaggtgccgtggttgtccaagaaggtattggtatggaagcggcctattggtcccaattgccggggaattttaagtggcgcacacgccctggcgcaatcacttcacgcaatttcgcagggtttgtctctttcgaaaactttccagagggcgccagctcaggccactggggcaacgcgattgcccgatttcgtaccaatggcggaacgcctttcgactatatcccgcatgagcacgatgttggcatgacggcaatattcgggcctatcgggaggggtaagacgacgctcatgatgtttgttctagccatgctcgaacagagcatggtcgaccgtgcaggtacggtcgtgttctttgacaaggaccggggtggcgaattgctggttcgcgccacaggaggaacatatttggcacttcacagaggcacacccagcgggttggcgccgttgcgtggcctagaaaacacagcagcctcacacgattttctgcgcgaatggatcgtggctctcatcgagagtgatggtcggggtgggatttctccggaagagaaccgccgtctggtccgtggtatccatcgtcagctctcgtttgatccacaaatgcgttcaatcgcggggttacgtgaatttttgttgcatgggcccgccgaaggcgcaggagcgcggctccaacgctggtgccggggccatgcgcttggctgggcatttgacggcgaagttgacgaagtaaagttagatccgtcgattaccggcttcgacatgacgcatcttctcgaatacgaggaagtatgcgctcccgctgcagcatatctcctgcatcggattggagccatgatcgacggccgccgttttgtgatgagctgcgatgagtttcgcgcctatttgttaaaccctaaattttcgactgtcgtcgacaaattcctcctgaccgttcgaaaaaacaacgggatgctaatactggcaacgcagcaaccagagcatgttctggaatcgccgctaggagccagcttggttgcgcaatgtatgacgaagattttctatccatcaccaaccgcagatcgatcggcttatgtcgatggactgaaatgtaccgaaaaggaatttcaggcgatccgtgaagacatgacggtcggcagccgtaagtttcttcttaaacgagaaagtggaagcgtcatctgcgaatttgatctgcgggatatgcgtgaatatgtcgccgtgctttcggggcgtgccaacacggtgcgctttgcaactcgactacgcgaggcacaagaaggcaactcatctggctggctcagcgaattcatggcccgtcaccacgaggcagaagattgataaggtaggaaacgatgaagacgacgcaacttattgcaacagttttgacctgcagctttctatatattcagcccgcgcgggcgcagtttgttgttagcgacccggcaacggaggctgagacgctcgcgactgcgctcgcgactgcggagaatctcactcagactatagcgatggttacgatgttgacgtcggcctacggcgttactggactactgacttcgctcaaccagaaaaatcagtatccttcgacgaaggacctagacaatgaaatgttttcgccgcgaatgccaatgtcgaccacggcacgtgcgatcaccagcgatacagatcgtgcagtcgtgggtagtgatgctgaagcggacctgttgcgatcgcagatcaccggttccgcaaacagcgctggcattgcggctgacaatctggaaacgatggacaaacgcttgacggcgaatgctgatacgtctgctcagctttcccgatctcgcaatatcatgcaggcaaccgtgaccaatggtttgcttctcaagcagatccatgacgcaatgattcaaaatgtacaggcgacaagcctattaacgatgactaccgcgcaggccggccttcacgaggcggaagaggcggccgctcaacgcaaggagcatcaaaagaccgctgtcatctttggtgccctcccctaaggctgggcgatttgttcatccgcccgcatcctcgccgaatgcgagctcattttatccaacattatgcgacaaaccagtcaagttcaggtccaatcgatgaatttcacgattccggcgccgtttacggccattcatacgatcttcgatgtagccttcacgacaggcttggactcgatgcttgagactatccaggaggcggtgagtgcgccattgatcgcctgtgtcactctttggattattgttcagggtattttagtcatacgcggcgaagtcgatacccgtagcggtatcactcgggtgatcacggtcaccatcgttgttgctctaattgttgggcaggctaactaccaagactatgtggtttccatcttcgaaaagacggtcccaaactttgttcagcagtttagtgtaaccggcttgcctctgcagactgttccggcacagttggatacaatgttcgccgtgacccaggccgtttttcagaaaatcgcatccgaaatcggtccgatgaacgaccaggacatccttgctttccaaggggcacagtgggtcctttacggcacgctctggtctgccttcggagtttacgacgccgttggaattctcacgaaagtgcttctcgcgatcgggcctctgatcctcgtcggatatatttttgatcgcacgcgggacatcgcagctaagtggatcgggcaacttatcacctacggtctcttgcttctcctcttaaacctcgtggcaacgatcgtcatcctaaccgaagcgactgcgctcacccttatgcttggtgtaatcaccttcgccggtacgaccgcggccaagatcattggtctttacgaactcgatatgttttttctgacaggggatgcgctcattgtcgctttgccggcgatcgccggcaacattggaggcagttactggagcggcgcaacccaatctgccagcagcttgtaccgtcgcttcgctcaggttgagcgaggctaggtcgcgcaaaaattcgcctcaatggagaattctatgaagtattgcctgctgtgcctagttgtcgctttgagcggctgccagacaaacgacacattagcgagctgcaaaggcccgatcttcccgctgaatgtggggcgatggcagcctactccgtcagatcttcagctcggcaattcgggtggacgctatgacggggcctgaatatgccatgctagtggcgcgcgaaagccttgccgagcactataaggaagtagaagcctttcaaaccgcgcgagcgaaatcggcgcgacgtctctccaaactcattgcagctgtcgcagctatcgcgattttgggaaatgttgctcaagcgttcgctatagccacaatggtgccgttgagcaggcttgtgcccgtatatctatggatacggccggacggcaccgttgacagcgaggtgtctgtctcgcgattgcctgcaactcaagaggaggccgtcgttaacgcctcattgtgggagtacgttcgcctgcgcgagagttatgatgccgacaccgctcagtacgcctacgacctggtatcgaacttcagtgccccaacagtgcgccaggattaccagcaattcttcaactatcccaatcccagttcgcctcaagtcattcttggcaaacgcggcagggtggaggtcgagcacatcgcttcaaatgatgtaactccaagcacgcagcaaattcgctataaaaggaccctcgtcgttgacggcaaaatgcctgtggtgagtacgtggaccgcgacagttcgctacgaaaaggtgaccagcttgcccggcagattgagactaaccaacccggcaggtctggttgtcacctcctatcagacatcggaagataccgtttcaaacgtaggccacagcgaaccatgatcagaaaagcacttttcattttagcatgtttatttgccgctgcgactggtgcggaggctgaagacactccaatggcgggcaagctagatccgcgcatgcgttatttggcttacaatcccgatcaagtggtgcgcctctcgacggcggttggagctactttggtcgtaacattcgccacgaacgaaacggtgacagcggttgccgtttcaaatagcaaagatctagcagccctaccgcggggaaattatctatttttcaaggcaagccaggtcctcacgcctcagccagtaatcgtgctaaccgcaagcgactccgggatgcgccgttatgttttcagtataagttccaagactctgtcccacctcgataaagagcagcccgatctctattacagcgtccaattcgcctaccccgccgacgatgcggcggctcggcgaagggaggcacaacagaaggctgttgtggacagactacacgcggaagcacaatatcaacggaaagctgagaatttattggatcagcctgtcacagcccttggtgcggcggacagtaattggcactacgtcgcccaaggcgatcgttcgctgttgccactcgaagtcttcgacaatggatttacgacggtattccactttccgggcaatgtacgcataccctccatctacaccatcaatcctgatggcaaggaagctgttgccaactattcagttaaagggagcgatgtcgagatttcttcggtttcccgaggttggcgtctgagggatggccacacagtactatgtatctggaacaccgcttacgatcccgttggccaaaggccgcaaacgggcacggtgaggcccgatgtgaaacgcgtcctgaagggggcgaagggatgaataacgatagtcagcaagcggcacatgaggttgatgcatctggatccctggtctccgacaaacatcgccggcgtctttcggggtctcagaaattgatcgtcggaggtgtcgttctcgcgttatcattaagcctcatttggctaggtgggcgccaaaagaaggtgaatgagaacgcatcgccgtcaactttgatcgcaacaaacaccaagccatttcatccagctccgattgaggtgccgccggatcctccagcggttcaagaggctgttcagcctgctgctcctctaccgccgaggggcgaaccggagcggcatgagccacggccggaagaaacaccgatttttgcatatagcagcggcgatcaaggggtcagcaaacgcgccattcagggcgacacgggccgaagacaagaaggcaagcgtgacgacaactccttgccgaatggcgaagtgtccggcgagaacgatttgtcgatacgtatgaaacccaccgagctgcagcccagcagcgccacgctcttgccgcaccccgattttatggtaacgcaagggacaataattccgtgcatcttgcaaaccgcaatcgacacaaatttggcaggctatgtaaagtgtgtcttgcctcaggatattcgtggaacaacgaacaatatcgtgcttcttgatcgtggcaccaccgttgttggcgaaatacagcgtggcttgcaacagggagatgggcgcgtttttgtgttgtgggatcgcgccgagacacctgaccatgcgatgatctcgttaacatcgccaagcgcggacgaactcggtcgctcaggattgccgggctcggtcgacagccacttctggcagcgttttagcggagctatgctcttgagtgttgttcaaggcgccttccaggcagctagcacctacgccggcagctcgggtggcgggatgagcttcaacagctttcaaaataacggtgagcagacaactgagacagcccttaaggcaaccatcaacataccgccaaccctgaagaagaatcagggtgacaccgtttccattttcgtagcacgggacctcgatttctttggtgtttaccagctccgcctgactggcggcgccacgcgggggaggaaccgccgctcttaatgaattcaaatttccgcttagagataggatacattgtaaatggaagtggatccgcaactacgctttcttctgaagccgattttggaatggctcgatgacccgaagactgaagaaattgcgatcaatcgacctggagaggcatttgtgcgccaagccggcatttttaccaagatgcctttgcccgtctcttatgatgatcttgaagatatcgctattttagcgggcgcgctgagaaagcaggatgtcggaccacgtaaccccctctgcgccactgaacttcctggtggtgaacgactacaaatctgtctgccgccgaccgttccctcgggcaccgtcagcttgaccattcgacggccaagctcgcgtgtttctggtcttaaagaagtctcctcccgttatgatgcttcgaggtggaaccagtggcagacacgaaggaaacgccaaaatcaggatgatgaagctatccttcagcattttgacaacggggatttggaagcgtttctgcacgcatgcgtcgtcagccgactgacgatgttgctatgtggccctaccggaagcggcaagacaacaatgagcaagaccttgatcagcgccatccccccccaggaaaggctaatcaccatagaagatacgctcgaactcgtcattccacacgataatcatgttagactactctactccaagaacggtgctgggctgggtgctgtgagcgccgagcacttgctccaagcaagtctgcgtatgcggccggaccggatattgcttggcgagatgcgcgacgatgcagcatgggcttatctgagtgaagtcgtctcgggacatccgggatcgatttcaacaatacacggcgcgaatccaatccaaggattcaagaaactgttttcccttgtcaaaagtagcgcccaaggtgctagcttggaagatcgcacactgattgacatgctctctacggcgatcgatgtcatcattccattccgtgcctatgaggacgtttatgaagtaggcgagatctggctcgcggcggacgcacgacgccggggcgagaccataggcgatctccttaatcaatagtagctgtaacctcgaagcgtttcacttgtaacaacgattgagaacttttgtcataaaattgaaatacttggttcgcattttcgtcatccgcggtcagccgcaattctgacgaactgcccatttagctggagatgattgtacatccttcacgtgaaaatttctcaagcgctgtgaacaagggttcagattttagattgagaggtgagccgttgaaacacgttcttcttatcgatgacgatgtcgctatgcggcatcttattatcgaataccttacgatccacgccttcaaagtgaccgcggtagccgacagcacccagttcactagagtactctcttccgcgacggtcgatgtcgtggttgttgatctaaatttaggtcgtgaagatgggcttgagatcgttcgaaatctggcggcaaagtctgatattccaatcataattatcagtggcgaccgccttgaggagacggataaagttgttgcactcgagctaggagcaagtgattttatcgctaagccgtttagtacgagagagtttcttgcacgcattcgggttgccttgcgcgtgcgccccaacgttgtccgctccaaagaccgacggtctttttgttttactgactggacacttaatctcaggcaacgtcgcttgatgtccgaagctggcggtgaggtgaaacttacggcaggtgagttcaatcttctcctcgcgtttttagagaaaccccgcgacgttctatcgcgcgagcaacttctcattgccagtcgagtacgcgacgaggaggtttacgacaggagtatagatgttctcattttgcggctgcgccgcaaacttgaggcggatccgtcaagccctcaactgataaaaacagcaagaggtgccggttatttctttgacgcggacgtgcaggtttcgcacggggggacgatggcagcctgagccaattgcatttgattaatttaggtgactgaggacgcggccagcggcctcaaacctacactcaatatttggtgaggggttccgataggtccctcttcaccaattgctcgatggcttctctccagcaaagaatgacgcgagcgcggcggtagccagcttgtggccgaaagctcgagcggtctccaaccccaacggatcaaaatgacttcgagcgacctcgagcaacgcaaccgggaacatgcgtgaggtctgaacgagaacggatttttctgtagttgaagggatcggataacttttcggggccacgcgaaatgatccatctgccagcatgctttcgaaatcgtccaacgcgcgccttaaaatcatttgtagcgacttcgagggactgtattgccgaacgaggttgtcatatgttttcgacacttgaggcgcgggcggtcgcgctgaaagaaaaacctggagctttttcggggacggaggtggactaagggcatccacagttagcttaagttgtcgatcgggactgtaaatgtgatcggcgacgagaggctcacgttgctggtctttctcgtcggctttttcaggcaagtgctggaggtccagcttctggggaacaagtgtcgggttgggatggtggatctcgggtcgagcaccagcaagccgccgtgcttcgccgaccgacaatgcgggcttgcgaattgccatcttcaagcctccaagattttgctgatcagtttcgaaatgaccacgacttcctccatcgcaatccgaagattcctctctatgaggcgcatcgtcggatcagttcccgtgtttagtaatgtaagatgcaacatgccgcgttctttcatcgcggcaaatgcatctctttcatgcatgggagacggtacaactggaaggctctctagcgtctctgacatcctgcgttgcgatgttgtcaatcggccgaccgggacgcgttggcgcaaaacagctgtaggaattgccaaattttcactcaacagcagctcgatgacgtagcggtaggtagatagtgcctcatcgatgtcgagcggcgttagcatggtggggatcagaagcaggtttgagctagcgatgattgtgttgttgagctcgctcgagccgccacgcgtatcggccaacgcataatcaaatccttcgagctcggcattttcataggctgcttcaagaaggggcatttcgtcggcggaatagacttcacagcgaggatcccaggtactgctttgtaaggcgttttctctccatcgcgtcagaggccggttttcgtcggcatcaaagagggccactcgtttaccgtcatttgccaaagcagcgcaaaggcccatgagtgcggtggttttgccagcaccccctttgaaagaacaaaacgtcaaaagttgcatattctgatcccgcctatcctgtgaaaccggagtgcatttgtatttttgttcgtataaatgtttttgtgattatcgatgagtaaaagcgttgttacactatttttatttcacattcgttataagacaattgcaaatgtagcaagtatattcagtattgactgtaaatgtactgttgatttcatattgagcagggctagacttccatccgtctacccgggcacatttcgtgctggagtatccagaccttccgctttctttggaggaagctatgtcaaaacacaccagagccacgtcgagtgagactaccatcaaccagcatcgatccctgaaagttgaagggttcaaggtcgtgagtgcccgtctgcgatcggccgagtatgaaaccttttcctatcaagcgcgcctgctgggactttcggatagtatggcaattcgcgttgcggtgcgccgcatcgggggctttctcgaaatagatgcagacacacgagaaaagatggaagccatacttcagtccatcggaatactctcaagcaatgtatccatgcttctatctgcctacgccgaagaccctcgatcggatctggaggctgtgcgagatgaacgtattgcttttggcgaggctttcgccgccctcgatggactactgcgctccattttgtccgtatcccggcgacggatcgacggtcgctcgttactgaaaggtgccttgtagcacttgaccacgcacctgacgggagaaaattggatgcccgatcgcgctcaagtaatcattcgcattgtgccaggaggtggaaccaagacccttcagcagataatcaatcagctggagtacctgtcccgaaagggaaagctggaactgcagcgttcagcccggcatctcgatattcccgttccgccggatcaaatccgtgagcttgcccaaagctgggttacggaggccgggatttatgacgaaagtcagtcagacgatgacaggcaacaagacttaacaacacacattattgtaagcttccccgcaggtaccgaccaaaccgcagcttatgaagcaagccgggaatgggcagccgagatgtttgggtcaggatacgggggtggccgctataactatctgacagcctaccacgtcgaccgcgatcatccacatttacatgtcgtggtcaatcgtcgggaacttctggggcaggggtggctgaaaatatccaggcgccatccccagctgaattatgacggcttacggaaaaagatggcagagatttcacttcgtcacggcatagtcctggatgcgacttcgcgagcagaaaggggaatagcagagcgaccaatcacatatgctgaatatcgacgccttgagcggatgcaggctcaaaagattcaattcgaagatacagattttgatgagacctcgcctgaggaagatcgtcgggacctcagtcaatcgttcgatccatttcgatcggacgcatctgccggcgaaccggaccgtgcaacccgacatgacaaacaaccgcttgaaccgcacgcccgtttccaggagcccgccggctccagcatcaaagccgacgcacggatccgcgtaccattggagagcgagcggggtgcccaaccatccgcgtccaaaatccctgtaactgggcatttcgggattgagacttcgtatgtcgctgaagccagcgtgcccaaacaaagcggcaattccgatacttctcgcccggtgactgacgttgccatgcacacagtcgagcgccagcagcgatcaaaacgacgtcatgacgaggaggcaggtccgagcggagcaaaccgtaaaagattgaaggccgcgcaagttgattccgaggcaaatgtcggtgagcccgacggtcgcgatgacagcaacaaggcggctgatccggtgtctgcttccatccgtaccgagcaaccggaagcttctccaacgtgtccgcgtgaccgtcacgatggagaattgggagaacgcaaacgtgcaagaggtaatcgtcgcgacgatgggcgcggggggacctagactagtagacaggaaggaccgaataatggcaaatggtcagttcacgatacgctctgctcgcccggcctccgtcggactgacaggcgaacggcgtggagccgcatccgcctctagctctgcactgtccaatgttcaaagagatgttagggataggctgattccaactagctcaccaagattaccaaatgcagccatattgcgtgattcctcgggaagagcgtcgactggtctgcggtacatggcggctactcttcattggtctgcgatcgcgccattatcgctaataaacagcaacgacctggctccggccgcttatgactttgagacgcgaaataacgcaagaaatgtgactgccaaagtcggcagggcagtccctgttcccaagcaaggcgggctcggcaaaacgctcgcacccgtaccccttagtacacgtatatcaagggtcaattccgaccgaagactgcccgctgacgcagaagaccgccctgaaacgcgcgacccccagaaaggacgtggcagtcatggtgcgacgccaaccttacatgaaaagattggaaccgcgtttgctcgaagattgcgaaagcatacgtactatattgtttgcagttgctgccagacccggagcgcgttgacgatgggtgcaaagatttcggtgaagtcatgaactccagcaagacttcgccccagcgtatgaccctgagcatcgtatgttcgctggcagccggtttttgtgcggccagctgctatgtaacgttccgccggggcttcaacggcgaagcgatgatgacgttcgacgttttcgctttttggtatgagaccccgctttacttgggttatgccagcaccgtcttctggcgtggtttatctgttgtcatctttacctcgctgatcgttctttcaagtcagctcatcatatcgctgcgcaatcagaagcatcatgggacagctcgttgggcagaaattggcgaaatgcggcatgctggttatctgcagcgttacagtcgcatcaaggggccgatctttggaaagacatgtggtcccctttggttcggcagttatttgaccaatggcgaacagccacacagtcttgtcgtcgcgccaacgcgtgctggcaaaggcgtcggcatcgtcattccaacgctgttgaccttcaagggctcggtaatcgcccttgacgtcaagggagaattgtttgaactgacgtccagagcacgcaaagcgagcggcgacgcagttttcaagttctcccccctagatcctgagcggaagactcattgttacaatccggtcctggatattgccgcacttccgcccgaacgccagttcactgaaacacgccgtctagctgcgaaccttattacggctaagggaaagggagcagaaggctttattgacggcgcacgtgacctgttcgtcgcgggaatccttacctgcattgagcgtggcacaccaacgattggcgcggtatatgacctatttgcgcagcctggcgaaaagtataagctttttgcgcaactcgcggaggaaagcctaaacaaagaggctcagcgtatcttcgataatatggcgggcaacgacacgaaaattctgacatcgtacacctctgtgctgggcgacggtggactgaacctgtgggctgatccgcttatcaaagcagcgacaagccggtcagacttttccgtttacgatctccggaggaagaagacctgcatttatctttgtgtcagtcccaacgatctggaggtcttggcaccacttatgcgcctgatgtttcagcagctcgtgtcaatcttgcagagatcgctgccaggtgaagacgagtgccatgaagttttatttctcctcgacgaattcaaacacctgggcaagcttgaggccatagagaccgcgatcacaaccatcgccggttacagaggccgctttatgtttattattcaaagtctttcggccttgtcgggcacatacgatgacgcaggaaaacaaaactttctgagcaatactggcgtacaagtatttatggccacggctgatgacgaaactccaacctacatctcaaaagctatcggcgaatatacgtttaaagcgcgttcgacctcttacagtcaagccagaatgttcgaccacaacatccagatttctgatcaaggtgcagcccttttgcgccccgaacaagtgcgcctgctagacgatcagagtgaaatcgttctcatcaaagggcgacctccactcaaattacgaaaggtgcagtattattccgatcgtacgctgaaaggccttttcgaacgccagatgggctctctgcctgagcccgcacccttgatgctttccgactatagcaacgatcaagttcaataccacttggctccgatagcaaattttaatgaggatgctgcaccgcaaaacagaactgtggccgaggaccatggaagtgttaaagtcggtgctgatatccctgaacgcgtgatgggaataaatggtgacgaggaacaagccgatgcgggcgagataccgccggaatcggttgtgcctccagaattgacgctcgctctgaccgctcaacagcaattgttggaccagattattgcacttcagcaaagatcgaggtccgcaccggcatagcctgcgaaatgatcttaatggtgcaattcgtttcaggcggcatgttgcggttcaacaaagtgtacgccagatcccaattggccctttacgaggtgtcggtatgacaggaaagtcgaaagttcacataagaggttcggctgacgcgcttcctgacgttcctggcggaagtactaccgccccttttttaaccgaaccttctcgggatcaggttgatgcctcgtttgaggtccaaaccgactacagccagtctacttccgtgtcgtttacctatgatggtgttggacttggtcctgccgagcgtgcggcttacgagaactggtgcgaaccgggccggcccacttggaaagatcttataatcaaggcacgtgtcgatccgattgacgatgtgacctggctccgagatttagaagaggacaccccctcaaccttcagatacgaagggatgcctctgggcatcggggaacgacaggcctacgaaaattggcaagaggacgctcagccgacatgggaagaccttgttgtcagcgcacgcttgacggaacttggccgtccacacgggattaccggcgagtatacatccctcgcaggatcgaagaatacaagttcaatttcattgaagcgaaagcggagcaacttaattgatgatgagaattcatccggatcgttttcatatgacgggatgaagctcggggaagccgagcgttctgcatatggtgactgggccgaggcggagccacccacgtggaaagatttggtattgagggcacgcgtttcctcgatcaatgactctgcttggctttttgattcacaaacatcttcatcatcatttgaatacaacggtgttcccttgggcgagccggaacggcaggctctcagacaatggcaaggagacgctcagcctacctgggaagatctcgttgttaacgcgcgtatggcagaactttgccatgctggttggattgaaggtcaaaaaggttgctttgaagagcgcggggaggctctgcccgcgtcggaacgcggttcgcaacgccccattggtcaacggacagattcctccgattcttttgtgtatgatggcacaaggctcggagcacctgagcgaactgcttatgaacgctggagtaagagggaacgcccgacttgggaagatctcatcttagatgcacaccaggccaggactgaaagtgacgctgttacgacccaagcgattggtcagtcgtcctcaccggttttcttatatgaaggaaagtcgctcggagacagggaacgaaaggcttacgaaaaatggcggcagccagcccaaccgcgatggcaaaatcttgtagtgaacgctcgtctggcagaaatcgatccctcagcctggattgccgatgagcgcgatccgcttgatgatagcgacgcgcttggtcgcccgtcgtacacaagcttgacggatagatcagacgtccctttagacgatcaatcaatctatcgtcgttccgacctagtaagggagcaggtgccagaatcgtctcaaaggcaattcgcagcatgttcagaatctgaaacgaggcctgtgcaatggtttactgcttctgggtcagatgcaaacaatacggaaaatatcaccgccagcgatcccgtcgatcgcacgggtggagttaagcggctaggctccaaaagcgacagaaccgttacagcttctatccatgacgtgaattccagcacaaggcgactgttgcttaacgaatttggatcggaggctccgcgcccttcgccagaaaagactgttcgcttaagaagcgacaatattggcacctatgggagccggaaaaatgaacgagcgcggctcgcgaccgaaaccggtgcgtatgagtcggagcatattttcgggttcaaggctgtccacgatactgcgagagcgacgaaagagggccggcgtctcgaaaggcccatgcccgcctaccttgaggataaggggcttcatcgccaacatattggcaccgggagaggacggaccaaacttgtcgggcgcggatggccggatgacacaagctatcgctcggatcaaagggcaactctgtcggaccccgttgcgcgctcggaaggcgcgacggcctcaaatgggtatcaattgaaccaattgggttacgcgcaccaactcgctagcgatggcctgcaaagtgaatcgcccgatggtgttgccttgccaattcaagtggcaacaacgagctacaactatacagtgagccgcgatcctgtccttgttccgccggataaaaacgaagcccctcaattgctgcatcttggtccccgtggtcaaaccgaagctgttcttgcccgcgaaacagcattgactggaaaatggccgactctcgagcgtgagcagcaagtgtatcgcgagtttttggccttatatgacgtaaaaaaagatcttgaggccaaatcagtcggcgtaagacggaaaaaaaaagaagttatttctgcgttagaccgaactgcgcgcttgataagcacgtcgccttcgaaagctcgatccaaagcagagactgaaaaagccattgatgagctcgatgatcgacgagtttatgatccgcgtgatcgagctcaagacaaagcgtttaaacgctgataagtcgccaatatagtgatcatttgcagtattcgcatcgatcgctggttgatattctgccgctggtcgaccggctgctcgtcgccaaaaatgctcacagggatacgatggcctcggtcaggccgcgtgcgtcctgtctttccagttcctccctttcagctcgattgtggcatcatttattgcctgctcattgcagttgaaacgcgatatccgtttcaagacccgggtatggatggtactttggagatatgagcacttgccagacttcccggtcggagacttaaaaattccgataagaggttacggacgacggaccttataagtggatcgtctagtggtggcgccgatcaaaacagttccgcccccggctttgctcaaagtagcaaagcagctttatctcgggttgcggaggattttctagaaaaccgcaattttgcaggagagaacatatggccatcatcaagccgcatgtgaacaaaaataggacaacctcgccgatagagagaccggagtctctcatagaggaaatgagcggcagtcatccgccgagtggttttaccaacctggatctcgctatgatcgagctggaggactttgtccatcggtgcccgctcccagaagacaatcttgctggtcagaaggagtgagacgatggatccgtctagcaatgagaatgtctatgtgggtcgcggtcacaacatcgaaaatgatgatgacactgaccccaggcgttggaagaaggcgaatatcagttccaacaccatctccgatattcagatgacgaatggcgaagacgtacaatcagggagccctacccgaacggaagttgtaagcccacgtctggattatggatcggtcgactcctcctccagcctttattctggcagcgagcacggaaatcaagctgagattcaaaaagagctgtccgtcttgttctcgaacatgtctttgccaggcaacgatcggcgcccggacgaatacattctcgtgcatcaaacgggacaagatgcttttactggtattgccaaaggcaacctcgaccaaatgcccaccaaggcggaatttaacgcgtgctgccgtctctacagggacggagccggtaattactacccgccacctctcgcattcgacaagattagcgttccagagcaactggaggaaaaatgggggatgatggaggcgaaggaacgtaacaaactgcggtttcagtacaagttggacgtatggaatcatgcgcacgctgatatggggatcacgggcacagagatcttttatcaaacagataagaacataaagctcgaccggaattataaactaagacctgaagaccgatacgtacaaacagaaaaatacgggcgccgggaaattcaaaagcgatatcaacacgaactccaggctggttcgctgctgcccgatattatgatcaaaactccccaaaatgacatccacttcgtgtacaggtttgccggcgacaattacgccaacaaacagttcagcgagtttgaacacaccgtcaagcgcaggtatggcgacgagactgagatcaaattgaagtcaaagtcaggcattatgcatgactcgaaatatctggaatcctgggaacggggcagtgcggatattcgcttcgcggaattcgttggggaaaatagagctcacaatcggcagtttccaactgcgacagtaaatatgggacagcagccagacgggcagggcggtttgacccgcgaccgtcatgtgagcgttgacttcctaatgcaaagcgcacccaattcgccttgggcgcaagctttgaaaaagggagaactgtgggatcgcgttcagttgcttgctcgcgacggcaaccgctatctgtcgccgcccagattggaatattctgaccctgcacatttcaccgagttgatgaaccgggttggtttacccgcatcgatgggtcggcaaagccatgcggctagtatcaaattcgaaaagtttgacgcgcaggcagcggttattgtcttaaatggcccagagttacgtgacattcatgacttgtctcctgaaaaactgcaaaatttgtccaccaaagatgtcatcgtcgccgatcgcaatgagaatggtcagagaactggcacgtacaccagcgtcgcggaatatgagcgcttgcagttaaggctgccacccgatgcagcgggggtgcttggtgaagcaactgacaaatattcacgtgatttcgttcggccagagccggcgtcgcgtccaatcagtgacagccgcaggatatacgaaagtcgaccgcgtagccaaagcgtcaacagcttttgacgttcctgctgccgcgtcaacgaggaagctcgtttgacccgggtttgccaatgaaagggctcaatcatggtgaacactacaaagaaaagttttgcgaagtcgcttacggcagatatgcgccgttctgctcagcgcgttgtcgagcaaatgcgaaaagcattgattaccgaagaagaggcgctcaagcggcaagccagactggagagtcccgataggaagcgaaagtatgctgctgatatggcgatagtcgacaaactcgacgtagggtttcgaggcgaaataggctataaaattcttggaaataaccggcttcgagtagacaaccataaagaattaacgcgtgagcacggtagacttcgcaaaaccaaaacggttctgaagcgtaacccggtgacgcaggaagtctatttgggtttatatgaaaggaagtcctggttaagtgtcagcagccatttgtatgctgcggacggcacactccgcatgaagcacgtgaaatacaaagacggacgttttgaggaaaaatgggagcgcgacgaaaatggcgacctgatccgcacaaggtacgccaaccgtggcaggctctttcaacctgtatccgagaaaatgggcgcgccgtatcggagcggccctgacgaccggctctatcgcgatctaacccgtcgaaacggtttcagacgggagacattcgaacgggacgatcacggaaacctcgagcgtatcggcagcaaccatgtcggcttttccaagatttcagtgaaggcacccaatcgtcaaacctcccagacgaagattcaaaaacttggtggcgctttcaacaaatcttttaggtcccttctggacaaggagggcaatgaaatgggccgcgatattttgagccatcgacggctctataacaagcggtctgctgtctacgatgaagctaccggacaattgaagagtgccaagcataccttcggcaagatctacaggagcgaaaccgaatatctcagcgcgggcctcaagaaggtttcaaaaaagatactcggggtgacggtctaccggaaatttgcggcgctcagcgagcgagaatccgaggctgagagactgcgtagttttgaatccggtgcgcatcgccagatctggcaggagcgggcagcgattcccggttcgcccctcccggagactgatgacattcatttcgcacagcagtcgcacctagccaaagccaaccctgatcacgtcgaagctgacgtcacgcgtgtgacagatcaacatgttgatgttgctggacaaacatcatcgtctccccaacggaacttggaaggatggttagattctcaatcacgatacaagccagcaaacatgctgttgtcaaatccagaccttcaagcgaacggacctcgcccatacgaagggttagctcatctcaccctccggcgcgataatgaatctgacgggcacaaggagaatgatcagcggctgcgacatttctcccagccagagccgttggtgttaccgcatcccgggtcgccggaaataactaaggtgtttggctcgcggggagagccggcacacccgagtggaaatctgcacacggcggttggagaaacggcttgcgaaggaccggtgatgtcttcatcctcggacaatcatcagccagctccaggacagcaagaacttttaagtttccttcataatgcgccagccccagtttctgtggcaatacatgatgatcaagagcgacttgcgggggaggcgcccggcggctctttcagaggtagctcagggcgaacgagttcaatgtcggagagtatcttcgacgaagatgtacaagggcatttggtacgggattattcgatcaatactactaacgggtttattgacccgcaatcgttgttcggtgaaccggacttatcgagaggtccaaaatcggggccagaaattccatcggaagattaccatttgtcagcttcggaacaggaaaatttgctgaatcaattgcttagtgtgccactgccggttccttcaccgaagcccgaatgcgcgaggtctatgattttcgaaggttcacgttcaagagagcgttccacctccagagggttctaaggtggaacgcgtctaggcttgcctatcatcaccacctcatgatggtcgcggagaccttcgaagagatatccgacatcattggagaagctgggccggaaactagtgtacctcgcgaatgcatctagatccaatccaatatgcatggcatgccgaatccatgtgggagtttattcttgacacagatatttatgatataataactgagtaagcttaacataaggaggaaaaacatatgttacgcagcagcaacgatgttacgcagcagggcagtcgccctaaaacaaagttaggtggctcaagtatgggcatcattcgcacatgtaggctcggccctgaccaagtcaaatccatgcgggctgctcttgatcttttcggtcgtgagttcggagacgtagccacctactcccaacatcagccggactccgattacctcgggaacttgctccgtagtaagacattcatcgcgcttgctgccttcgaccaagaagcggttgttggcgctctcgcggcttacgttctgcccaagtttgagcagccgcgtagtgagatctatatctatgatctcgcagtctccggcgagcaccggaggcagggcattgccaccgcgctcatcaatctcctcaagcatgaggccaacgcgcttggtgcttatgtgatctacgtgcaagcagattacggtgacgatcccgcagtggctctctatacaaagttgggcatacgggaagaagtgatgcactttgatatcgacccaagtaccgccacctaataatgtctaacaattcgttcaagccgacgccgcttcgcggcgcggcttaactcaagcgttagatgcactatacgtaccaatccaaatcggatccccctgcagggctgagataggtgcctcactgattaagcattggtaactgtcagaccaagtttactcatatatactttagattgatttaaaacttcatttttaatttaaaaggatctaggtgaagatcctttttgataatctcatgaccaaaatcccttaacgtgagttttcgttccactgagcgtcagaccccgtagaaaagatcaaaggatcttcttgagatcctttttttctgcgcgtaatctgctgcttgcaaacaaaaaaaccaccgctaccagcggtggtttgtttgccggatcaagagctaccaactctttttccgaaggtaactggcttcagcagagcgcagataccaaatactgtccttctagtgtagccgtagttaggccaccacttcaagaactctgtagcaccgcctacatacctcgctctgctaatcctgttaccagtggctgctgccagtggcgataagtcgtgtcttaccgggttggactcaagacgatagttaccggataaggcgcagcggtcgggctgaacggggggttcgtgcacacagcccagcttggagcgaacgacctacaccgaactgagatacctacagcgtgagctatgagaaagcgccacgcttcccgaagggagaaaggcggacaggtatccggtaagcggcagggtcggaacaggagagcgcacgagggagcttccagggggaaacgcctggtatctttatagtcctgtcgggtttcgccacctctgacttgagcgtcgatttttgtgatgctcgtcaggggggcggagcctatggaaaaacgccagcaacgcggcctttttacggttcctggccttttgctggccttttgctcacatgttctttcctgcgttatcccctgattctgtggataaccgtattaccgcctttgagtgagctgataccgctcgccgcagccgaacgaccgagcgcagcgagtcagtgagcgaggaagcggaagagcgcctgatgcggtattttctccttacgcatctgtgcggtatttcacaccgcatatggtgcactctcagtacaatctgctctgatgccgcatagttaagccagtatacactccgctatcgctacgtgactgggtcatggctgcgccccgacacccgccaacacccgctgacgcgccctgacgggcttgtctgctcccggcatccgcttacagacaagctgtgaccgtctccgggagctgcatgtgtcagaggttttcaccgtcatcaccgaaacgcgcgaggcagcagatctatcgatggtacctatctgcagacggaagggattcctgttaattaaaacagcttgcgtcatgcggtcgctgcgtatatgatgcgatgagtaaataaacaaatacgcaaggggaacgcatgaaggttatcgctgtacttaaccagaaaggcgggtcaggcaagacgaccatcgcaacccatctagcccgcgccctgcaactcgccggggccgatgttctgttagtcgattccgatccccagggcagtgcccgcgattgggcggccgtgcgggaagatcaaccgctaaccgttgtcggcatcgaccgcccgacgattgaccgcgacgtgaaggccatcggccggcgcgacttcgtagtgatcgacggagcgccccaggcggcggacttggctgtgtccgcgatcaaggcagccgacttcgtgctgattccggtgcagccaagcccttacgacatatgggccaccgccgacctggtggagctggttaagcagcgcattgaggtcacggatggaaggctacaagcggcctttgtcgtgtcgcgggcgatcaaaggcacgcgcatcggcggtgaggttgccgaggcgctggccgggtacgagctgcccattcttgagtcccgtatcacgcagcgcgtgagctacccaggcactgccgccgccggcacaaccgttcttgaatcagaacccgagggcgacgctgcccgcgaggtccaggcgctggccgctgaaattaaatcaaaactcatttgagttaatgaggtaaagagaaaatgagcaaaagcacaaacacgctaagtgccggccgtccgagcgcacgcagcagcaaggctgcaacgttggccagcctcgcagacacgccagccatgaagcgggtcaactttcagttgccggcggaggatcacaccaagctgaagatgtacgcggtacgccaaggcaagaccattaccgagctgctatctgaatacatcgcgcagctaccagagtaaatgagcaaatgaataaatgagtagatgaattttagcggctaaaggaggcggcatggaaaatcaagaacaaccaggcaccgacgccgtggaatgccccatgtgtggaggaacgggcggttggccaggcgtaagcggctgggttgcctgccggccctgcaatggcactggaacccccaagcccgaggaatcggcgtgagcggtcgcaaaccatccggcccggtacaaatcggcgcggcgctgggtgatgacctggtggagaagttgaaggcagcgcaggccgcccagcggcaacgcatcgaggcagaagcacgccccggtgaatcgtggcaagcagccgctgatcgaatccgcaaagaatcccggcaaccgccggcagccggtgcgccgtcgattaggaagccgcccaagggcgacgagcaaccagattttttcgttccgatgctctatgacgtgggcacccgcgatagtcgcagcatcatggacgtggccgttttccgtctgtcgaagcgtgaccgacgagctggcgaggtgatccgctacgagcttccagacgggcacgtagaggtttccgcagggccggcaggcatggccagtgtgtgggattacgacctggtactgatggcggtttcccatctaaccgaatccatgaaccgataccgggaagggaagggagacaagcccggccgcgtgttccgtccacacgttgcggacgtactcaagttctgccggcgagccgatggcggaaagcagaaagacgacctggtagaaacctgcattcggttaaacaccacgcacgttgccatgcagcgtacgaagaaggccaagaacggccgcctggtgacggtatccgagggtgaagccttgattagccgctacaagatcgtaaagagcgaaaccgggcggccggagtacatcgagatcgagctagctgattggatgtaccgcgagatcacagaaggcaagaacccggacgtgctgacggttcaccccgattactttttgatcgatcccggcatcggccgttttctctaccgcctggcacgccgcgccgcaggcaaggcagaagccagatggttgttcaagacgatctacgaacgcagtggcagcgccggagagttcaagaagttctgtttcaccgtgcgcaagctgatcgggtcaaatgacctgccggagtacgatttgaaggaggaggcggggcaggctggcccgatcctagtcatgcgctaccgcaacctgatcgagggcgaagcatccgccggttcctaatgtacggagcagatgctagggcaaattgccctagcaggggaaaaaggtcgaaaaggtctctttcctgtggatagcacgtacattgggaacccaaagccgtacattgggaaccggaacccgtacattgggaacccaaagccgtacattgggaaccggtcacacatgtaagtgactgatataaaagagaaaaaaggcgatttttccgcctaaaactctttaaaacttattaaaactcttaaaacccgcctggcctgtgcataactgtctggccagcgcacagccgaagagctgcaaaaagcgcctacccttcggtcgctgcgctccctacgccccgccgcttcgcgtcggcctatgcatataattgtggtttcaaaatcggctccgtcgatactatgttatacgccaactctgaaaacaactttgaaaaagctgttttctggtattt

SEQ ID NO: 185 - DNA, 8903 bp, synthetic construct
  misc_feature 1..8903: note = RV038288
  source 1..8903: mol_type = other DNA
gtttacccgccaatatatcctgtcaaacactgcggccgcacttgaccgcggatggagccggagctgtggtgaggccatcgacgggaggtgggggagaacacagtctcagtgttctttgtgagtccgcaaggtttttagcttttctgtattaattaaggttgctgttggctgtagaatacggtcgtggaagagctgtatcggtagctactacgtaagctattatatactggaagtctggagctcgtcgatctccggtcgtcttcctccatttctcctcgtcttgctttgactgctgctaccatttgcttctgttttctgatgaagcatgccatgtcggccaccagtgtttgtgtggtttttgcagggaatggctttcaagtgctgtgattgaatggccctcgtcgtcctcggctgagctcacatggacgcgtcatgtgagtgagatatatgatcatatgatgagtggggttcgggtgagtgcgtacttgaagtaggatcccgctttcactcattcattcattggcctttaaaccgggaaattttcgcgaggagatggagggaagcaagcagggtgacgagtgcagagtgccgcgagcgctttgtcaaaaggcaccgccgtaggcaaaaaaatcaatggccctgactgactcgatggtagtactactgtagagactagagagggttgctccccatatcttcgtgtgacttttactccagcattgcatttccgtcattgagacgttaattaatagcagctttcgggacagatgactgtggccatgtttcgtcacggccgcttcgtgccagctgggggtactatagtactgtgattttgttagtaaaaactttcattaggccaccattgacgaccgggccttcgcttttgctgcgctaattaaccatttcccggcgaccgaagggaacatgaacatgccccgacacatgagggcatgaggactagtgttctccctgtcgttcgttgacttgactagtgatagtttaaacgctcttcaactggaagagcggttactaccggttcactagctagctgctaatcgagctagttaccctatgaggtgacatgaagcgctcacggttactatgacggttagcttcacgactgttggtggcagtagcgtacgacttagctatagttccggacttacccttaagataacttcgtatagcatacattatacgaagttatgggcccacgcgtgaagagcggttaccagagctggtcacctttgtccaccaagatggaactgtcttcggccagaatggccatctggattcagcaggcctagaaggccatttatcgctatcaactttgtatagaaaagttgggccgagctcggtacggccagaatggcccggaccgggttaccaagcggccgcatcgagcagctggcttgtggggaccagacaaaaaaggaatggtgcagaattgttaggcgcacctaccaaaagcatctttgcctttattgcaaagataaagcagattcctctagtacaagtggggaacaaaataacgtggaaaagagctgtcctgacagcccactcactaatgcgtatgacgaacgcagtgacgaccacaaaactcgagcaacgagatcatgagccaatcaaagaggagtgatgtagacctaaagcaataatggagccatgacgtaagggcttacgcccatacgaaataattaaaggctgatgtgacctgtcggtctctcagaacctttactttttatgtttggcgtgtatttttaaatttccacggcaatgacgatgtgaccgtcgacccactaaaacattgctttgtcaaaagctaaaaaagatgatgcccgacagccacttgtgtgaagcatgagaagccggtccctccactaagaaaattagtgaagcatcttccagtggtccctccactcacagctcaatcagtgagcaacaggacgaaggaaatgacgtaagccatgacgtctaatcccagggcccggtgaccaatcgaattcttagacgcgactgctgacaaccctagctagaaacaccctgaacactagttaggttttcctctgttatctgcgttgtcgatgtagttttctttatctcgagcaccgatgtgcatctgtgatcgggagatcatgtctctggaaactgttgtcttcgagatcctgtattaggagaaggaaaataaggtttttgagaagcgtattcacatgactactcacgttttccttgccatcgaccacgtcgtcgaccctgctagcttccacgttgtcattcagtatgttcgatcgcatcatctgatctaatcttataatgcagttcatctgttatggtagaagtgtgtcgcattcttataattagcatgttagggttacatgttaggtaacagacaccgagattatctctgtacaccattgttgccttcattgcctacgtcgtctctcacagccacaggtgtctgaatcatgaccctctttttaggagtagtctgtagagatgtgaggtaaagcagctttgcacgagaacgccaatctcgcgtgtttccgagtattttactgctccatttgtgggctacgcctgttgtttccgccacggatgtcggctgctcatcaccaaaaatatgactactttgaagttctggtagcagagtgggcccagacgccgttgcttgattctggctgggccaggctacgtgaggccttcttattagatcatttccgctgaaaggccgaaacgtgagagcctggcaaacttttctagaaaaaaaaaattcgcaaacaaaattttttccgaacaaacgctacaccagtgaccgccgtccgtcgtcgttgcttggctctccctttacttcggctccaacgccaatgcacaaccgtccctcttcgccatgtcccagttttgacgctgcctgtagcgcagtataaaaaatcgtctcgatgctcttgctcggtactccaattcacaccaaaacatagagtgtcgacttttctattggtgtgattgggggcactaaatacctaccacattgcactcagactacatatactgtgtttgtgtgttgtaagccgtaagcgtgtgtgagcttgcgcaaattggacatctaggccgtgcgtaccctgcgcatggcggccaatgcgggcggcggtggagcgggaggaggcagcggcagcggcagcgtggctgcgccggcggtgtgccgccccagcggctcgcggtggacgccgacgccggagcagatcaggatgctgaaggagctctactacggctgcggcatccggtcgcccagctcggagcagatccagcgcatcaccgccatgctgcggcagcacggcaagatcgagggcaagaacgtcttctactggttccagaaccacaaggcccgcgagcgccagaagcgccgcctcaccagcctcgacgtcaacgtgcccgccgccggcgcggccgacgccaccaccagccaactcggcgtcctctcgctgtcgtcgccgccgccttcaggcgcggcgcctccctcgcccaccctcggcttctacgccgccggcaatggcggcggatcggctgtgctgctggacacgagttccgactggggcagcagcggcgctgctatggccaccgagacatgcttcctgcaggactacatgggcgtgacggacacgggcagctcgtcgcagtggccacgcttctcgtcgtcggacacgataatggcggcggccgcggcgcgggcggcgacgacgcgggcgcccgagacgctccctctcttcccgacctgcggcgacgacggcggcagcggtagcagcagctacttgccgttctggggtgccgcgtccacaactgccggcgccacttcttccgttgcgatccaacagcaacaccagctgcaggagcagtacagcttttacagcaacagcaacagcacccagctggccggcaccggcaaccaagacgtatcggcaacagcagcagcagccgccgccctggagctgagcctcagctcatggtgctccccttaccctgctgcagggagtatgtgagagcaacgcgagctgccactgctcttcactgatgtctctggaatggaaggaggaggaagtgagaacagatcattcgacaaagcagcattagtccgttgatcggtggaagaccactcgtcagtgttgagttgaatgtttgatcaataaaatacggcaatgctgtaagggttgttttttatgccattgataatacactgtactgttcagttgttgaactctatttcttagccatgccaagtgcttttcttattttgaataacattacagcaaaaagttgaaagacaaaaaaaaaaacccccgaacagagtgctttgggtcccaagcttctttagactgtgttcggcgttccccctaaatttctccccctatatctcactcacttgtcacatcagcgttctctttccccctatatctccacgctctacagcagttccacctatatcaaacctctataccccaccacaacaatattatatactttcatcttcaactaactcatgtaccttccaatttttttctactaataattatttacgtgcacagaaacttagcaaggagagagagagcggggtcacccggtccgggcctagaaggccagcttcaagtttgtacaaaaaagcaggctccggccagaatggcccggaccgggttaccgaattcgagctcggtaccctgggatccgatatcgatgggccctggccgaagcttggtcacccggtccgggcctagaaggccgatctcccgggcacccagctttcttgtacaaagtggccgttaacggatcggccagaatggcccggaccgaagccgaggccggccacactgatagtttaaactgaaggcgggaaacgacaatctgatcatgagcggagaattaagggagtcacgttatgacccccgccgatgacgcgggacaagccgttttacgtttggaactgacagaaccgcaacgattgaaggagccactcagccgcgggtttctggagtttaatgagctaagcacatacgtcagaaaccattattgcgcgttcaaaagtcgcctaaggtcactatcagctagcaaatatttcttgtcaaaaatgctccactgacgttccataaattcccctcggtatccaattagagtctcatattcactctcccggcggatctcgactctagaggatcgctcaggaaggccgctgagatagagccatggggaggagggcgtgttgcgcgaaggaaggcgttaagagaggggcgtggacgagcaaggaggacgatgccttggccgcctacgtcaaggcccacggcgaaggcaaatggagggaagtgccccagaaagccggtttgcgtcggtgcggcaagagctgccggctgcggtggctgaactacctccggcccaacatcaggcgcggcaacatctcctacgacgaggaggatctcatcatccgcctccacaggctcctcggcaacaggtggtcgctgattgcaggcaggctgcctggccgaacagacaatgaaatcaagaactactggaacagcacgctgggccggagggcaggcgccggcgccggcgccggcggcagatccacgatggcgctttcagcttcccgagttcagcaggcggaagaactgctgcaacgacctgctgagaggcagctgatgaggagccagcttgctgcagccgccaggagcatcaactggagctacgccctcttctggtccatttcagacactcaaccaggggtgctgacgtggacggacgggttctacaacggcgaggtgaagacgcggaagatttccaactccgtggagctgacatccgaccagctcgtcatgcagaggagcgaccagctccgggagctctacgaggccctcctgtcgggcgagggcgaccgccgcgctgcgcctgcgcggccggccggctctctgtcgccggaggacctcggcgacaccgagtggtactacgtggtgtccatgacctacgccttccggccaggccaagggttgcccggcaggagtttcgcgagcgacgagcatgtctggctgtgcaacgcgcacctcgccggcagcaaagccttcccccgcgcgctcctcgccaagagcgcgtccattcagtcaatcctctgcatcccggttatgggcggcgtgcttgagcttggtacaactgacacggtgccggaggccccggacttggtcagccgagcaaccgcggctttctgggagccgcagtgcccgagctccagcccgtcaggacgagcaaacgagacgggcgaggccgcagcagacgacggcacgtttgcgttcgaggaactcgaccacaataatggcatggacgacatagaggcgatgaccgccgccgggggacacgggcaggaggaggagctaagactaagagaagccgaggccctgtcagacgacgcaagcctggagcacatcaccaaggagatcgaggagttctacagcctctgcgacgaaatggacctgcaggcgctaccactaccgctagaggacggctggaccgtggacgcgtccaatttcgaggtcccctgctcttccccgcagccagcgccgcctccggtggatagggctaccgctaacgtcgccgccgacgcctcaagggcacccgtctacggctctcgcgcgacgagtttcatggcttggacgaggtcctcgcagcagtcgtcgtgctccgacgacgcggcgcccgcagcagtagtgccggccatcgaggagccgcagagattgctgaagaaagtggtggccggcggcggtgcttgggagagctgtggcggcgcgacgggagcagcacaggaaatgagtggcactggcaccaagaaccacgtcatgtcggagcgaaagcgacgagagaagctcaacgagatgttcctcgtcctcaagtcactgcttccgtccattcacagggtgaacaaagcgtcgatcctcgccgaaacgatagcctacctcaaggagcttcagagaagggtgcaagagctggagtccagtagggaacctgcgtcgcgcccatccgaaacgacgacaaggctaataacaaggccctcccgtggcaataatgagagtgtgaggaaggaggtctgcgcgggctccaagaggaagagcccagagctcggcagagacgacgtggagcgccccccggtcctcacgatggacgccggcaccagcaacgtcaccgtcaccgtctcggacaaggatgtgctcctggaggtgcagtgccggtgggaggagctcctgatgacgcgagtgttcgacgccatcaagagcctccatttggacgtcctctcggttcaggcttcagcgccagatggcttcatggggcttaagatacgagctcagtttgctggctccggtgccgtcgtgccctggatgatcagcgaggctcttcgcaaagctatagggaacccctgggtcgtcgtcgcgccggacaccggctcgcacgccaccccggccgcgacgtcgggcgcctgcgagacgggccagaatagcgccgctcatcgcgcggaccccgactcagccgggacgacgacgacctcggcggcggcggtgtgggcgcccaaggccgtgcggtgcacgggcggactcttcttcttccaccgggacacgacgccggcgcacgcgggcgagacggcgacgccaatggccggtggaggtggaggaggaggaggagaagcagggtcgtcggacgactgcagctcggcggcgtcggtatcgcttcgcgtcggaagccacgacgagccgtgcttctccggcgacggtgacggcgactggatggacgacgtgagggccctggcgtcgtttctggagtccgacgaggactggctccgctgtcagacggccgggcagcttgcgtagtggccaggtaccactaactatctatactgtaataatgttgtatagccgccggatagctagctagtttagtcattcagcggcgatgggtaataataaagtgtcatccatccatcaccatgcgtggcaacgtgagcaatgacctgattgaacaaattgaaatgaaaagaagaaatatgttatatgtcaacgagatttcctcataatgccactgacgacgtgtgtccaagaaatgtatcagtgatacgtatattcacaatttttttatgacttatactcacaatttgtttttttactacttatactcacaatttgttgtgcgtaccataacaatttcgatcgaatatatatcagaaagttgacgaaagtaagctcactcaaaaagttaaatgggctgcggaagctgcgtcaggcccaagttttggctattctatccggtatccacgattttgatggctgagggacatatgttcgcttaagcttggcgcgccggtcacccggtccgggcctagaaggccagcttcggccgccccgggcaactttattatacaaagttgatagataaatcagatatctggttcctaaggacccggcggaccgattaaactgattcggtccgacgcgttacctaataacttcgtatagcatacattatacgaagttattagctaactaactagtaagcttaagccatgggtcgacggatccgttacctgagctgattccgatgacttcgtaggttcctagctcaagccgctcgtgtccaagcgtcacttacgattagctaatgattacggcatctaggaccgactagctaactaactagtacgtacgcgccgactagctagctaaggtaccgagctcgaattcattccgattaatcgtggcctcttgctcttcaggatgaagagctatgtttaaacgtgcaagcgctactagacaattcagtacattaaaaacgtccgcaatgtgttattaagttgtctaagcgtcaatttgtttacaccacaatatatcctgcca

SEQ ID NO: 186 - DNA, 8874 bp, synthetic construct
  misc_feature 1..8874: note = RV022820
  source 1..8874: mol_type = other DNA
aacactgcggccgcacttgaccgcggatggagccggagctgtggtgaggccatcgacgggaggtgggggagaacacagtctcagtgttctttgtgagtccgcaaggtttttagcttttctgtattaattaaggttgctgttggctgtagaatacggtcgtggaagagctgtatcggtagctactacgtaagctattatatactggaagtctggagctcgtcgatctccggtcgtcttcctccatttctcctcgtcttgctttgactgctgctaccatttgcttctgttttctgatgaagcatgccatgtcggccaccagtgtttgtgtggtttttgcagggaatggctttcaagtgctgtgattgaatggccctcgtcgtcctcggctgagctcacatggacgcgtcatgtgagtgagatatatgatcatatgatgagtggggttcgggtgagtgcgtacttgaagtaggatcccgctttcactcattcattcattggcctttaaaccgggaaattttcgcgaggagatggagggaagcaagcagggtgacgagtgcagagtgccgcgagcgctttgtcaaaaggcaccgccgtaggcaaaaaaatcaatggccctgactgactcgatggtagtactactgtagagactagagagggttgctccccatatcttcgtgtgacttttactccagcattgcatttccgtcattgagacgttaattaatagcagctttcgggacagatgactgtggccatgtttcgtcacggccgcttcgtgccagctgggggtactatagtactgtgattttgttagtaaaaactttcattaggccaccattgacgaccgggccttcgcttttgctgcgctaattaaccatttcccggcgaccgaagggaacatgaacatgccccgacacatgagggcatgaggactagtgttctccctgtcgttcgttgacttgactagtgatagtttaaacgctcttcaactggaagagcggttactaccggttcactagctagctgctaatcgagctagttaccctatgaggtgacatgaagcgctcacggttactatgacggttagcttcacgactgttggtggcagtagcgtacgacttagctatagttccggacttacccttaagataacttcgtatagcatacattatacgaagttatgggcccacgcgtgaagagcggttaccagagctggtcacctttgtccaccaagatggaactgtcttcggccagaatggccatctggattcagcaggcctagaaggccatttatcgctatcaactttgtatagaaaagttgggccgagctcggtacggccagaatggcccggaccgggttaccaagcggccgcatcgagcagctggcttgtggggaccagacaaaaaaggaatggtgcagaattgttaggcgcacctaccaaaagcatctttgcctttattgcaaagataaagcagattcctctagtacaagtggggaacaaaataacgtggaaaagagctgtcctgacagcccactcactaatgcgtatgacgaacgcagtgacgaccacaaaactcgagcaacgagatcatgagccaatcaaagaggagtgatgtagacctaaagcaataatggagccatgacgtaagggcttacgcccatacgaaataattaaaggctgatgtgacctgtcggtctctcagaacctttactttttatgtttggcgtgtatttttaaatttccacggcaatgacgatgtgaccgtcgacccactaaaacattgctttgtcaaaagctaaaaaagatgatgcccgacagccacttgtgtgaagcatgagaagccggtccctccactaagaaaattagtgaagcatcttccagtggtccctccactcacagctcaatcagtgagcaacaggacgaaggaaatgacgtaagccatgacgtctaatcccagggcccggtgaccaatcgaattcttaccctagctccctgcggctgttacgcggtcccccatcaatcttctgttcttgcggttgtagcctgtgtaacagtgctagagtatgtatgataaataggttttaagtctgcttacatgacattttttattgtggaagagacatataaaaattagagagagtggttctcatgcaacggcggacggcccggtgctaaaagagcttcaagacaaaataatgaaacaggaagagagtagatttatctaagagccaactttattatatgaatgtgtttattgttggctttagatgatatggtaaggagttagagctaataatagataggctctattattattattattaattaaactcgctctaaggaggaaagtgggaggaagggacgaggacgaagactactggaagcatcgtgcatggatgatggatgtggtgtctcttaatgtaggtggccggaggatgtacgtgttaattgcgcgataagcactcagatccaaccgcaaactacctccacactgacacactgatagagagaaagagagacctccgacgactgccgccgcagatgagccacgtacgtatacgacgtctgccggccggctcaggctgccgccatcaccctgctcgaaagtcgcgttaggcggcgccagctacataggagtatctagtctagccagttagtatactactactgcgctgatgatgaattaactctgcatagatactgtacttgcctccctccaacacccaaccacctcctgctcggctcttaataacttggacacggatcgatgccatccaaggaagaacacgacgacgacgacggaacatccaccatgcaagcttgcatccatacgccgatacgcgtgcatccatccatccaccattatttccattttccaaacaacgtaagcgcttacgcaccgaacaacgtaagcgcttacgcaccgaacaacgtaagcgcttacgcacccgatcacacgtacacaggcctatttaaggagcgacatcccactgcaactctcctcaccactcatcaccagctagctctagcaaagcacttgccatctaccgaccgccgcattccaaacagcccgacgagctagcagagcggcaggcacctccctcctcaaggaacccatggcggccaatgcgggcggcggtggagcgggaggaggcagcggcagcggcagcgtggctgcgccggcggtgtgccgccccagcggctcgcggtggacgccgacgccggagcagatcaggatgctgaaggagctctactacggctgcggcatccggtcgcccagctcggagcagatccagcgcatcaccgccatgctgcggcagcacggcaagatcgagggcaagaacgtcttctactggttccagaaccacaaggcccgcgagcgccagaagcgccgcctcaccagcctcgacgtcaacgtgcccgccgccggcgcggccgacgccaccaccagccaactcggcgtcctctcgctgtcgtcgccgccgccttcaggcgcggcgcctccctcgcccaccctcggcttctacgccgccggcaatggcggcggatcggctgtgctgctggacacgagttccgactggggcagcagcggcgctgctatggccaccgagacatgcttcctgcaggactacatgggcgtgacggacacgggcagctcgtcgcagtggccacgcttctcgtcgtcggacacgataatggcggcggccgcggcgcgggcggcgacgacgcgggcgcccgagacgctccctctcttcccgacctgcggcgacgacggcggcagcggtagcagcagctacttgccgttctggggtgccgcgtccacaactgccggcgccacttcttccgttgcgatccaacagcaacaccagctgcaggagcagtacagcttttacagcaacagcaacagcacccagctggccggcaccggcaaccaagacgtatcggcaacagcagcagcagccgccgccctggagctgagcctcagctcatggtgctccccttaccctgctgcagggagtatgtgagagcaacgcgagctgccactgctcttcactgatgtctctggaatggaaggaggaggaagtgagaacagatcattcgacaaagcagcattagtccgttgatcggtggaagaccactcgtcagtgttgagttgaatgtttgatcaataaaatacggcaatgctgtaagggttgttttttatgccattgataatacactgtactgttcagttgttgaactctatttcttagccatgccaagtgcttttcttattttgaataacattacagcaaaaagttgaaagacaaaaaaaaaaacccccgaacagagtgctttgggtcccaagcttctttagactgtgttcggcgttccccctaaatttctccccctatatctcactcacttgtcacatcagcgttctctttccccctatatctccacgctctacagcagttccacctatatcaaacctctataccccaccacaacaatattatatactttcatcttcaactaactcatgtaccttccaatttttttctactaataattatttacgtgcacagaaacttagcaaggagagagagagcggggtcacccggtccgggcctagaaggccagcttcaagtttgtacaaaaaagcaggctccggccagaatggcccggaccgggttaccgaattcgagctcggtaccctgggatccgatatcgatgggccctggccgaagcttggtcacccggtccgggcctagaaggccgatctcccgggcacccagctttcttgtacaaagtggccgttaacggatcggccagaatggcccggaccgaagccgaggccggccacactgatagtttaaactgaaggcgggaaacgacaatctgatcatgagcggagaattaagggagtcacgttatgacccccgccgatgacgcgggacaagccgttttacgtttggaactgacagaaccgcaacgattgaaggagccactcagccgcgggtttctggagtttaatgagctaagcacatacgtcagaaaccattattgcgcgttcaaaagtcgcctaaggtcactatcagctagcaaatatttcttgtcaaaaatgctccactgacgttccataaattcccctcggtatccaattagagtctcatattcactctcccggcggatctcgactctagaggatcgctcaggaaggccgctgagatagagccatggggaggagggcgtgttgcgcgaaggaaggcgttaagagaggggcgtggacgagcaaggaggacgatgccttggccgcctacgtcaaggcccacggcgaaggcaaatggagggaagtgccccagaaagccggtttgcgtcggtgcggcaagagctgccggctgcggtggctgaactacctccggcccaacatcaggcgcggcaacatctcctacgacgaggaggatctcatcatccgcctccacaggctcctcggcaacaggtggtcgctgattgcaggcaggctgcctggccgaacagacaatgaaatcaagaactactggaacagcacgctgggccggagggcaggcgccggcgccggcgccggcggcagatccacgatggcgctttcagcttcccgagttcagcaggcggaagaactgctgcaacgacctgctgagaggcagctgatgaggagccagcttgctgcagccgccaggagcatcaactggagctacgccctcttctggtccatttcagacactcaaccaggggtgctgacgtggacggacgggttctacaacggcgaggtgaagacgcggaagatttccaactccgtggagctgacatccgaccagctcgtcatgcagaggagcgaccagctccgggagctctacgaggccctcctgtcgggcgagggcgaccgccgcgctgcgcctgcgcggccggccggctctctgtcgccggaggacctcggcgacaccgagtggtactacgtggtgtccatgacctacgccttccggccaggccaagggttgcccggcaggagtttcgcgagcgacgagcatgtctggctgtgcaacgcgcacctcgccggcagcaaagccttcccccgcgcgctcctcgccaagagcgcgtccattcagtcaatcctctgcatcccggttatgggcggcgtgcttgagcttggtacaactgacacggtgccggaggccccggacttggtcagccgagcaaccgcggctttctgggagccgcagtgcccgagctccagcccgtcaggacgagcaaacgagacgggcgaggccgcagcagacgacggcacgtttgcgttcgaggaactcgaccacaataatggcatggacgacatagaggcgatgaccgccgccgggggacacgggcaggaggaggagctaagactaagagaagccgaggccctgtcagacgacgcaagcctggagcacatcaccaaggagatcgaggagttctacagcctctgcgacgaaatggacctgcaggcgctaccactaccgctagaggacggctggaccgtggacgcgtccaatttcgaggtcccctgctcttccccgcagccagcgccgcctccggtggatagggctaccgctaacgtcgccgccgacgcctcaagggcacccgtctacggctctcgcgcgacgagtttcatggcttggacgaggtcctcgcagcagtcgtcgtgctccgacgacgcggcgcccgcagcagtagtgccggccatcgaggagccgcagagattgctgaagaaagtggtggccggcggcggtgcttgggagagctgtggcggcgcgacgggagcagcacaggaaatgagtggcactggcaccaagaaccacgtcatgtcggagcgaaagcgacgagagaagctcaacgagatgttcctcgtcctcaagtcactgcttccgtccattcacagggtgaacaaagcgtcgatcctcgccgaaacgatagcctacctcaaggagcttcagagaagggtgcaagagctggagtccagtagggaacctgcgtcgcgcccatccgaaacgacgacaaggctaataacaaggccctcccgtggcaataatgagagtgtgaggaaggaggtctgcgcgggctccaagaggaagagcccagagctcggcagagacgacgtggagcgccccccggtcctcacgatggacgccggcaccagcaacgtcaccgtcaccgtctcggacaaggatgtgctcctggaggtgcagtgccggtgggaggagctcctgatgacgcgagtgttcgacgccatcaagagcctccatttggacgtcctctcggttcaggcttcagcgccagatggcttcatggggcttaagatacgagctcagtttgctggctccggtgccgtcgtgccctggatgatcagcgaggctcttcgcaaagctatagggaacccctgggtcgtcgtcgcgccggacaccggctcgcacgccaccccggccgcgacgtcgggcgcctgcgagacgggccagaatagcgccgctcatcgcgcggaccccgactcagccgggacgacgacgacctcggcggcggcggtgtgggcgcccaaggccgtgcggtgcacgggcggactcttcttcttccaccgggacacgacgccggcgcacgcgggcgagacggcgacgccaatggccggtggaggtggaggaggaggaggagaagcagggtcgtcggacgactgcagctcggcggcgtcggtatcgcttcgcgtcggaagccacgacgagccgtgcttctccggcgacggtgacggcgactggatggacgacgtgagggccctggcgtcgtttctggagtccgacgaggactggctccgctgtcagacggccgggcagcttgcgtagtggccaggtaccactaactatctatactgtaataatgttgtatagccgccggatagctagctagtttagtcattcagcggcgatgggtaataataaagtgtcatccatccatcaccatgcgtggcaacgtgagcaatgacctgattgaacaaattgaaatgaaaagaagaaatatgttatatgtcaacgagatttcctcataatgccactgacgacgtgtgtccaagaaatgtatcagtgatacgtatattcacaatttttttatgacttatactcacaatttgtttttttactacttatactcacaatttgttgtgcgtaccataacaatttcgatcgaatatatatcagaaagttgacgaaagtaagctcactcaaaaagttaaatgggctgcggaagctgcgtcaggcccaagttttggctattctatccggtatccacgattttgatggctgagggacatatgttcgcttaagcttggcgcgccggtcacccggtccgggcctagaaggccagcttcggccgccccgggcaactttattatacaaagttgatagataaatcagatatctggttcctaaggacccggcggaccgattaaactgattcggtccgacgcgttacctaataacttcgtatagcatacattatacgaagttattagctaactaactagtaagcttaagccatgggtcgacggatccgttacctgagctgattccgatgacttcgtaggttcctagctcaagccgctcgtgtccaagcgtcacttacgattagctaatgattacggcatctaggaccgactagctaactaactagtacgtacgcgccgactagctagctaaggtaccgagctcgaattcattccgattaatcgtggcctcttgctcttcaggatgaagagctatgtttaaacgtgcaagcgctactagacaattcagtacattaaaaacgtccgcaatgtgttattaagttgtctaagcgtcaattt

SEQ ID NO: 187 - DNA, 8437 bp, synthetic construct
  misc_feature 1..8437: note = RV006010
  source 1..8437: mol_type = other DNA
aacactgcggccgcacttgaccgcggatggagccggagctgtggtgaggccatcgacgggaggtgggggagaacacagtctcagtgttctttgtgagtccgcaaggtttttagcttttctgtattaattaaggttgctgttggctgtagaatacggtcgtggaagagctgtatcggtagctactacgtaagctattatatactggaagtctggagctcgtcgatctccggtcgtcttcctccatttctcctcgtcttgctttgactgctgctaccatttgcttctgttttctgatgaagcatgccatgtcggccaccagtgtttgtgtggtttttgcagggaatggctttcaagtgctgtgattgaatggccctcgtcgtcctcggctgagctcacatggacgcgtcatgtgagtgagatatatgatcatatgatgagtggggttcgggtgagtgcgtacttgaagtaggatcccgctttcactcattcattcattggcctttaaaccgggaaattttcgcgaggagatggagggaagcaagcagggtgacgagtgcagagtgccgcgagcgctttgtcaaaaggcaccgccgtaggcaaaaaaatcaatggccctgactgactcgatggtagtactactgtagagactagagagggttgctccccatatcttcgtgtgacttttactccagcattgcatttccgtcattgagacgttaattaatagcagctttcgggacagatgactgtggccatgtttcgtcacggccgcttcgtgccagctgggggtactatagtactgtgattttgttagtaaaaactttcattaggccaccattgacgaccgggccttcgcttttgctgcgctaattaaccatttcccggcgaccgaagggaacatgaacatgccccgacacatgagggcatgaggactagtgttctccctgtcgttcgttgacttgactagtgatagtttaaacgctcttcaactggaagagcggttactaccggttcactagctagctgctaatcgagctagttaccctatgaggtgacatgaagcgctcacggttactatgacggttagcttcacgactgttggtggcagtagcgtacgacttagctatagttccggacttacccttaagataacttcgtatagcatacattatacgaagttatgggcccacgcgtgaagagcggttaccagagctggtcacctttgtccaccaagatggaactgtcttcggccagaatggccatctggattcagcaggcctagaaggccatttatcgctatcaactttgtatagaaaagttgggccgagctcggtacggccagaatggcccggaccgggttaccaagcggccgcatcgagcagctggcttgtggggaccagacaaaaaaggaatggtgcagaattgttaggcgcacctaccaaaagcatctttgcctttattgcaaagataaagcagattcctctagtacaagtggggaacaaaataacgtggaaaagagctgtcctgacagcccactcactaatgcgtatgacgaacgcagtgacgaccacaaaactcgagcaacgagatcatgagccaatcaaagaggagtgatgtagacctaaagcaataatggagccatgacgtaagggcttacgcccatacgaaataattaaaggctgatgtgacctgtcggtctctcagaacctttactttttatgtttggcgtgtatttttaaatttccacggcaatgacgatgtgaccgtcgacccactaaaacattgctttgtcaaaagctaaaaaagatgatgcccgacagccacttgtgtgaagcatgagaagccggtccctccactaagaaaattagtgaagcatcttccagtggtccctccactcacagctcaatcagtgagcaacaggacgaaggaaatgacgtaagccatgacgtctaatcccagggcccggtgaccaatcgaattcttaccctagctccctgcggctgttacgcggtcccccatcaatcttctgttcttgcggttgtagcctgtgtaacagtgctagagtatgtatgataaataggttttaagtctgcttacatgacattttttattgtggaagagacatataaaaattagagagagtggttctcatgcaacggcggacggcccggtgctaaaagagcttcaagacaaaataatgaaacaggaagagagtagatttatctaagagccaactttattatatgaatgtgtttattgttggctttagatgatatggtaaggagttagagctaataatagataggctctattattattattattaattaaactcgctctaaggaggaaagtgggaggaagggacgaggacgaagactactggaagcatcgtgcatggatgatggatgtggtgtctcttaatgtaggtggccggaggatgtacgtgttaattgcgcgataagcactcagatccaaccgcaaactacctccacactgacacactgatagagagaaagagagacctccgacgactgccgccgcagatgagccacgtacgtatacgacgtctgccggccggctcaggctgccgccatcaccctgctcgaaagtcgcgttaggcggcgccagctacataggagtatctagtctagccagttagtatactactactgcgctgatgatgaattaactctgcatagatactgtacttgcctccctccaacacccaaccacctcctgctcggctcttaataacttggacacggatcgatgccatccaaggaagaacacgacgacgacgacggaacatccaccatgcaagcttgcatccatacgccgatacgcgtgcatccatccatccaccattatttccattttccaccgatcacacgtacacaggcctatttaaggagcgacatcccactgcaactctcctcaccactcatcaccagctagctctagcaaagcacttgccatctaccgaccgccgcattccaaacagcccgacgagctagcagagcggcaggcacctccctcctcaaggaacccatgtatggcaccgaagaagaagcgcaaggtgatggcggccaatgcgggcggcggtggagcgggaggaggcagcggcagcggcagcgtggctgcgccggcggtgtgccgccccagcggctcgcggtggacgccgacgccggagcagatcaggatgctgaaggagctctactacggctgcggcatccggtcgcccagctcggagcagatccagcgcatcaccgccatgctgcggcagcacggcaagatcgagggcaagaacgtcttctactggttccagaaccacaaggcccgcgagcgccagaagcgccgcctcaccagcctcgacgtcaacgtgcccgccgccggcgcggccgacgccaccaccagccaactcggcgtcctctcgctgtcgtcgccgccgccttcaggcgcggcgcctccctcgcccaccctcggcttctacgccgccggcaatggcggcggatcggctgtgctgctggacacgagttccgactggggcagcagcggcgctgccatggccaccgagacatgcttcctgcaggactacatgggcgtgacggacacgggcagctcgtcgcagtggccacgcttctcgtcgtcggacacgataatggcggcggccgcggcgcgggcggcgacgacgcgggcgcccgagacgctccctctcttcccgacctgcggcgacgacggcggcagcggtagcagcagctacttgccgttctggggtgccgcgtccacaactgccggcgccacttcttccgttgcgatccagcagcaacaccagctgcaggagcagtacagcttttacagcaacagcaacagcacccagctggccggcaccggcaaccaagacgtatcggcaacagcagcagcagccgccgccctggagctgagcctcagctcatggtgctccccttaccctgctgcagggagtatgggtggaggcggctccggtggcggaggctccggaggcggtggctccccgaaggcggcaaatgacgtggatcggctgacacgggattttgacgagcgcatccgcgtccgcggggatggacgtggactctaaggtaccgttaacagatcattcgacaaagcagcattagtccgttgatcggtggaagaccactcgtcagtgttgagttgaatgtttgatcaataaaatacggcaatgctgtaagggttgttttttatgccattgataatacactgtactgttcagttgttgaactctatttcttagccatgccaagtgcttttcttattttgaataacattacagcaaaaagttgaaagacaaaaaaaaaaacccccgaacagagtgctttgggtcccaagcttctttagactgtgttcggcgttccccctaaatttctccccctatatctcactcacttgtcacatcagcgttctctttccccctatatctccacgctctacagcagttccacctatatcaaacctctataccccaccacaacaatattatatactttcatcttcaactaactcatgtaccttccaatttttttctactaataattatttacgtgcacagaaacttagcaaggagagagagagcggggtcacccggtccgggcctagaaggccagcttcaagtttgtacaaaaaagcaggctccggccagaatggcccggaccgggttaccgaattcgagctcggtaccctgggatccgatatcgatgggccctggccgaagcttggtcacccggtccgggcctagaaggccgatctcccgggcacccagctttcttgtacaaagtggccgttaacggatcggccagaatggcccggaccgaagcttgcatgcctgcagtgcagcgtgacccggtcgtgcccctctctagagataatgagcattgcatgtctaagttataaaaaattaccacatattttttttgtcacacttgtttgaagtgcagtttatctatctttatacatatatttaaactttactctacgaataatataatctatagtactacaataatatcagtgttttagagaatcatataaatgaacagttagacatggtctaaaggacaattgagtattttgacaacaggactctacagttttatctttttagtgtgcatgtgttctcctttttttttgcaaatagcttcacctatataatacttcatccattttattagtacatccatttagggtttagggttaatggtttttatagactaatttttttagtacatctattttattctattttagcctctaaattaagaaaactaaaactctattttagtttttttatttaataatttagatataaaatagaataaaataaagtgactaaaaattaaacaaataccctttaagaaattaaaaaaactaaggaaacatttttcttgtttcgagtagataatgccagcctgttaaacgccgtcgacgagtctaacggacaccaaccagcgaaccagcagcgtcgcgtcgggccaagcgaagcagacggcacggcatctctgtcgctgcctctggacccctctcgagagttccgctccaccgttggacttgctccgctgtcggcatccagaaattgcgtggcggagcggcagacgtgagccggcacggcaggcggcctcctcctcctctcacggcaccggcagctacgggggattcctttcccaccgctccttcgctttcccttcctcgcccgccgtaataaatagacaccccctccacaccctctttccccaacctcgtgttgttcggagcgcacacacacacaaccagatctcccccaaatccacccgtcggcacctccgcttcaaggtacgccgctcgtcctcccccccccccctctctaccttctctagatcggcgttccggtccatgcatggttagggcccggtagttctacttctgttcatgtttgtgttagatccgtgtttgtgttagatccgtgctgctagcgttcgtacacggatgcgacctgtacgtcagacacgttctgattgctaacttgccagtgtttctctttggggaatcctgggatggctctagccgttccgcagacgggatcgatttcatgattttttttgtttcgttgcatagggtttggtttgcccttttcctttatttcaatatatgccgtgcacttgtttgtcgggtcatcttttcatgcttttttttgtcttggttgtgatgatgtggtctggttgggcggtcgttctagatcggagtagaattctgtttcaaactacctggtggatttattaattttggatctgtatgtgtgtgccatacatattcatagttacgaattgaagatgatggatggaaatatcgatctaggataggtatacatgttgatgcgggttttactgatgcatatacagagatgctttttgttcgcttggttgtgatgatgtggtgtggttgggcggtcgttcattcgttctagatcggagtagaatactgtttcaaactacctggtgtatttattaattttggaactgtatgtgtgtgtcatacatcttcatagttacgagtttaagatggatggaaatatcgatctaggataggtatacatgttgatgtgggttttactgatgcatatacatgatggcatatgcagcatctattcatatgctctaaccttgagtacctatctattataataaacaagtatgttttataattattttgatcttgatatacttggatgatggcatatgcagcagctatatgtggatttttttagccctgccttcatacgctatttatttgcttggtactgtttcttttgtcgatgctcaccctgttgtttggtgttacttctgcaggtcgactttaacttagcctaggatccatggcctcctccgagaacgtcatcaccgagttcatgcgcttcaaggtgcgcatggagggcaccgtgaacggccacgagttcgagatcgagggcgagggcgagggccgcccctacgagggccacaacaccgtgaagctgaaggtgaccaagggcggccccctgcccttcgcctgggacatcctgtccccccagttccagtacggctccaaggtgtacgtgaagcaccccgccgacatccccgactacaagaagctgtccttccccgagggcttcaagtgggagcgcgtgatgaacttcgaggacggcggcgtggcgaccgtgacccaggactcctccctgcaggacggctgcttcatctacaaggtgaagttcatcggcgtgaacttcccctccgacggccccgtgatgcagaagaagaccatgggctgggaggcctccaccgagcgcctgtacccccgcgacggcgtgctgaagggcgagacccacaaggccctgaagctgaaggacggcggccactacctggtggagttcaagtccatctacatggccaagaagcccgtgcagctgcccggctactactacgtggacgccaagctggacatcacctcccacaacgaggactacaccatcgtggagcagtacgagcgcaccgagggccgccaccacctgttcctgtagggtaccacatggttaacctagacttgtccatcttctggattggccaacttaattaatgtatgaaataaaaggatgcacacatagtgacatgctaatcactataatgtgggcatcaaagttgtgtgttatgtgtaattactagttatctgaataaaagagaaagagatcatccatatttcttatcctaaatgaatgtcacgtgtctttataattctttgatgaaccagatgcatttcattaaccaaatccatatacatataaatattaatcatatataattaatatcaattgggttagcaaaacaaatctagtctaggtgtgttttgcgaatgcggccgccaccgcggtggagctcgaattccggtccgggcctagaaggccagcttcggccgccccgggcaactttattatacaaagttgatagataaatcagatatctggttcctaaggacccggcggaccgattaaactgattcggtccgacgcgttacctaataacttcgtatagcatacattatacgaagttattagctaactaactagtaagcttaagccatgggtcgacggatccgttacctgagctgattccgatgacttcgtaggttcctagctcaagccgctcgtgtccaagcgtcacttacgattagctaatgattacggcatctaggaccgactagctaactaactagtacgtacgcgccgactagctagctaaggtaccgagctcgaattcattccgattaatcgtggcctcttgctcttcaggatgaagagctatgtttaaacgtgcaagcgctactagacaattcagtacattaaaaacgtccgcaatgtgttattaagttgtctaagcgtcaattt

SEQ ID NO: 188 - DNA, 8737 bp, synthetic construct
  misc_feature 1..8737: note = PHP91522
  source 1..8737: mol_type = other DNA
aacactgcggccgcacttgaccgcggatggagccggagctgtggtgaggccatcgacgggaggtgggggagaacacagtctcagtgttctttgtgagtccgcaaggtttttagcttttctgtattaattaaggttgctgttggctgtagaatacggtcgtggaagagctgtatcggtagctactacgtaagctattatatactggaagtctggagctcgtcgatctccggtcgtcttcctccatttctcctcgtcttgctttgactgctgctaccatttgcttctgttttctgatgaagcatgccatgtcggccaccagtgtttgtgtggtttttgcagggaatggctttcaagtgctgtgattgaatggccctcgtcgtcctcggctgagctcacatggacgcgtcatgtgagtgagatatatgatcatatgatgagtggggttcgggtgagtgcgtacttgaagtaggatcccgctttcactcattcattcattggcctttaaaccgggaaattttcgcgaggagatggagggaagcaagcagggtgacgagtgcagagtgccgcgagcgctttgtcaaaaggcaccgccgtaggcaaaaaaatcaatggccctgactgactcgatggtagtactactgtagagactagagagggttgctccccatatcttcgtgtgacttttactccagcattgcatttccgtcattgagacgttaattaatagcagctttcgggacagatgactgtggccatgtttcgtcacggccgcttcgtgccagctgggggtactatagtactgtgattttgttagtaaaaactttcattaggccaccattgacgaccgggccttcgcttttgctgcgctaattaaccatttcccggcgaccgaagggaacatgaacatgccccgacacatgagggcatgaggactagtgttctccctgtcgttcgttgacttgactagtgatagtttaaacgctcttcaactggaagagcggttactaccggttcactagctagctgctaatcgagctagttaccctatgaggtgacatgaagcgctcacggttactatgacggttagcttcacgactgttggtggcagtagcgtacgacttagctatagttccggacttacccttaagataacttcgtatagcatacattatacgaagttatgggcccacgcgtgaagagcggttaccagagctggtcacctttgtccaccaagatggaactgtcttcggccagaatggccatctggattcagcaggcctagaaggccatttatcgctatcaactttgtatagaaaagttgggccgagctcggtacggccagaatggcccggaccgggttaccaagcggccgcatcgagcagctggcttgtggggaccagacaaaaaaggaatggtgcagaattgttaggcgcacctaccaaaagcatctttgcctttattgcaaagataaagcagattcctctagtacaagtggggaacaaaataacgtggaaaagagctgtcctgacagcccactcactaatgcgtatgacgaacgcagtgacgaccacaaaactcgagcaacgagatcatgagccaatcaaagaggagtgatgtagacctaaagcaataatggagccatgacgtaagggcttacgcccatacgaaataattaaaggctgatgtgacctgtcggtctctcagaacctttactttttatgtttggcgtgtatttttaaatttccacggcaatgacgatgtgaccgtcgacccactaaaacattgctttgtcaaaagctaaaaaagatgatgcccgacagccacttgtgtgaagcatgagaagccggtccctccactaagaaaattagtgaagcatcttccagtggtccctccactcacagctcaatcagtgagcaacaggacgaaggaaatgacgtaagccatgacgtctaatcccagggcccggtgaccaatcgaattcttaccctagctccctgcggctgttacgcggtcccccatcaatcttctgttcttgcggttgtagcctgtgtaacagtgctagagtatgtatgataaataggttttaagtctgcttacatgacattttttattgtggaagagacatataaaaattagagagagtggttctcatgcaacggcggacggcccggtgctaaaagagcttcaagacaaaataatgaaacaggaagagagtagatttatctaagagccaactttattatatgaatgtgtttattgttggctttagatgatatggtaaggagttagagctaataatagataggctctattattattattattaattaaactcgctctaaggaggaaagtgggaggaagggacgaggacgaagactactggaagcatcgtgcatggatgatggatgtggtgtctcttaatgtaggtggccggaggatgtacgtgttaattgcgcgataagcactcagatccaaccgcaaactacctccacactgacacactgatagagagaaagagagacctccgacgactgccgccgcagatgagccacgtacgtatacgacgtctgccggccggctcaggctgccgccatcaccctgctcgaaagtcgcgttaggcggcgccagctacataggagtatctagtctagccagttagtatactactactgcgctgatgatgaattaactctgcatagatactgtacttgcctccctccaacacccaaccacctcctgctcggctcttaataacttggacacggatcgatgccatccaaggaagaacacgacgacgacgacggaacatccaccatgcaagcttgcatccatacgccgatacgcgtgcatccatccatccaccattatttccattttccaccgatcacacgtacacaggcctatttaaggagcgacatcccactgcaactctcctcaccactcatcaccagctagctctagcaaagcacttgccatctaccgaccgccgcattccaaacagcccgacgagctagcagagcggcaggcacctccctcctcaaggaacccatgtatggcaccgaagaagaagcgcaaggtgatggcggccaatgcgggcggcggtggagcgggaggaggcagcggcagcggcagcgtggctgcgccggcggtgtgccgccccagcggctcgcggtggacgccgacgccggagcagatcaggatgctgaaggagctctactacggctgcggcatccggtcgcccagctcggagcagatccagcgcatcaccgccatgctgcggcagcacggcaagatcgagggcaagaacgtcttctactggttccagaaccacaaggcccgcgagcgccagaagcgccgcctcaccagcctcgacgtcaacgtgcccgccgccggcgcggccgacgccaccaccagccaactcggcgtcctctcgctgtcgtcgccgccgccttcaggcgcggcgcctccctcgcccaccctcggcttctacgccgccggcaatggcggcggatcggctgtgctgctggacacgagttccgactggggcagcagcggcgctgccatggccaccgagacatgcttcctgcaggactacatgggcgtgacggacacgggcagctcgtcgcagtggccacgcttctcgtcgtcggacacgataatggcggcggccgcggcgcgggcggcgacgacgcgggcgcccgagacgctccctctcttcccgacctgcggcgacgacggcggcagcggtagcagcagctacttgccgttctggggtgccgcgtccacaactgccggcgccacttcttccgttgcgatccagcagcaacaccagctgcaggagcagtacagcttttacagcaacagcaacagcacccagctggccggcaccggcaaccaagacgtatcggcaacagcagcagcagccgccgccctggagctgagcctcagctcatggtgctccccttaccctgctgcagggagtatgggtggaggcggctccggtggcggaggctccggaggcggtggctccctcaaaatcctctcgcgaaacgcgaaattgttgtctcatgccgtgcggcacgcagcaacacttccagatggagaacaattaagtgaagcgcaactgtcgcaaatgcgaagtgaagtcgctactcgcccagtcctgggcgtagcgtatacccatcaagacggtcaaccagaagagaggttgtcagggaaccacttggaccataaaatcaacaatatccctaacttggtcttcaacgttgcggaaccgattatgttcaatgaaatctccgctctcgaggttatggcagaagttcggcccatagcccgatccattaaaacggctcacgacgatgcgcgagcggaattaatgtcggcggacagacctcgatcaacgcgcggtctatgaggtaccgttaacagatcattcgacaaagcagcattagtccgttgatcggtggaagaccactcgtcagtgttgagttgaatgtttgatcaataaaatacggcaatgctgtaagggttgttttttatgccattgataatacactgtactgttcagttgttgaactctatttcttagccatgccaagtgcttttcttattttgaataacattacagcaaaaagttgaaagacaaaaaaaaaaacccccgaacagagtgctttgggtcccaagcttctttagactgtgttcggcgttccccctaaatttctccccctatatctcactcacttgtcacatcagcgttctctttccccctatatctccacgctctacagcagttccacctatatcaaacctctataccccaccacaacaatattatatactttcatcttcaactaactcatgtaccttccaatttttttctactaataattatttacgtgcacagaaacttagcaaggagagagagagcggggtcacccggtccgggcctagaaggccagcttcaagtttgtacaaaaaagcaggctccggccagaatggcccggaccgggttaccgaattcgagctcggtaccctgggatccgatatcgatgggccctggccgaagcttggtcacccggtccgggcctagaaggccgatctcccgggcacccagctttcttgtacaaagtggccgttaacggatcggccagaatggcccggaccgaagcttgcatgcctgcagtgcagcgtgacccggtcgtgcccctctctagagataatgagcattgcatgtctaagttataaaaaattaccacatattttttttgtcacacttgtttgaagtgcagtttatctatctttatacatatatttaaactttactctacgaataatataatctatagtactacaataatatcagtgttttagagaatcatataaatgaacagttagacatggtctaaaggacaattgagtattttgacaacaggactctacagttttatctttttagtgtgcatgtgttctcctttttttttgcaaatagcttcacctatataatacttcatccattttattagtacatccatttagggtttagggttaatggtttttatagactaatttttttagtacatctattttattctattttagcctctaaattaagaaaactaaaactctattttagtttttttatttaataatttagatataaaatagaataaaataaagtgactaaaaattaaacaaataccctttaagaaattaaaaaaactaaggaaacatttttcttgtttcgagtagataatgccagcctgttaaacgccgtcgacgagtctaacggacaccaaccagcgaaccagcagcgtcgcgtcgggccaagcgaagcagacggcacggcatctctgtcgctgcctctggacccctctcgagagttccgctccaccgttggacttgctccgctgtcggcatccagaaattgcgtggcggagcggcagacgtgagccggcacggcaggcggcctcctcctcctctcacggcaccggcagctacgggggattcctttcccaccgctccttcgctttcccttcctcgcccgccgtaataaatagacaccccctccacaccctctttccccaacctcgtgttgttcggagcgcacacacacacaaccagatctcccccaaatccacccgtcggcacctccgcttcaaggtacgccgctcgtcctcccccccccccctctctaccttctctagatcggcgttccggtccatgcatggttagggcccggtagttctacttctgttcatgtttgtgttagatccgtgtttgtgttagatccgtgctgctagcgttcgtacacggatgcgacctgtacgtcagacacgttctgattgctaacttgccagtgtttctctttggggaatcctgggatggctctagccgttccgcagacgggatcgatttcatgattttttttgtttcgttgcatagggtttggtttgcccttttcctttatttcaatatatgccgtgcacttgtttgtcgggtcatcttttcatgcttttttttgtcttggttgtgatgatgtggtctggttgggcggtcgttctagatcggagtagaattctgtttcaaactacctggtggatttattaattttggatctgtatgtgtgtgccatacatattcatagttacgaattgaagatgatggatggaaatatcgatctaggataggtatacatgttgatgcgggttttactgatgcatatacagagatgctttttgttcgcttggttgtgatgatgtggtgtggttgggcggtcgttcattcgttctagatcggagtagaatactgtttcaaactacctggtgtatttattaattttggaactgtatgtgtgtgtcatacatcttcatagttacgagtttaagatggatggaaatatcgatctaggataggtatacatgttgatgtgggttttactgatgcatatacatgatggcatatgcagcatctattcatatgctctaaccttgagtacctatctattataataaacaagtatgttttataattattttgatcttgatatacttggatgatggcatatgcagcagctatatgtggatttttttagccctgccttcatacgctatttatttgcttggtactgtttcttttgtcgatgctcaccctgttgtttggtgttacttctgcaggtcgactttaacttagcctaggatccatggcctcctccgagaacgtcatcaccgagttcatgcgcttcaaggtgcgcatggagggcaccgtgaacggccacgagttcgagatcgagggcgagggcgagggccgcccctacgagggccacaacaccgtgaagctgaaggtgaccaagggcggccccctgcccttcgcctgggacatcctgtccccccagttccagtacggctccaaggtgtacgtgaagcaccccgccgacatccccgactacaagaagctgtccttccccgagggcttcaagtgggagcgcgtgatgaacttcgaggacggcggcgtggcgaccgtgacccaggactcctccctgcaggacggctgcttcatctacaaggtgaagttcatcggcgtgaacttcccctccgacggccccgtgatgcagaagaagaccatgggctgggaggcctccaccgagcgcctgtacccccgcgacggcgtgctgaagggcgagacccacaaggccctgaagctgaaggacggcggccactacctggtggagttcaagtccatctacatggccaagaagcccgtgcagctgcccggctactactacgtggacgccaagctggacatcacctcccacaacgaggactacaccatcgtggagcagtacgagcgcaccgagggccgccaccacctgttcctgtagggtaccacatggttaacctagacttgtccatcttctggattggccaacttaattaatgtatgaaataaaaggatgcacacatagtgacatgctaatcactataatgtgggcatcaaagttgtgtgttatgtgtaattactagttatctgaataaaagagaaagagatcatccatatttcttatcctaaatgaatgtcacgtgtctttataattctttgatgaaccagatgcatttcattaaccaaatccatatacatataaatattaatcatatataattaatatcaattgggttagcaaaacaaatctagtctaggtgtgttttgcgaatgcggccgccaccgcggtggagctcgaattccggtccgggcctagaaggccagcttcggccgccccgggcaactttattatacaaagttgatagataaatcagatatctggttcctaaggacccggcggaccgattaaactgattcggtccgacgcgttacctaataacttcgtatagcatacattatacgaagttattagctaactaactagtaagcttaagccatgggtcgacggatccgttacctgagctgattccgatgacttcgtaggttcctagctcaagccgctcgtgtccaagcgtcacttacgattagctaatgattacggcatctaggaccgactagctaactaactagtacgtacgcgccgactagctagctaaggtaccgagctcgaattcattccgattaatcgtggcctcttgctcttcaggatgaagagctatgtttaaacgtgcaagcgctactagacaattcagtacattaaaaacgtccgcaatgtgttattaagttgtctaagcgtcaattt

SEQ ID NO: 189 - DNA, 20515 bp, synthetic construct
  misc_feature 1..20515: note = PHP90308
  source 1..20515: mol_type = other DNA
aacactgatagtttaaactgaaggcgggaaacgacaatctgatcatgagcggagaattaagggagtcacgttatgacccccgccgatgacgcgggacaagccgttttacgtttggaactgacagaaccgcaacgttgaaggagccactcagcaagctggtacgattgtaatacgactcactatagggcgaattgagcgctgtttaaacgctcttcaactggaagagcggttacgctgtttaaacgctcttcaactggaagagcggttactaccggttcactagctagctgctaatcgagctagttaccctatgaggtgacatgaagcgctcacggttactatgacggttagcttcacgactgttggtggcagtagcgtacgacttagctatagttccggacttacccttaagataacttcgtatagcatacattatacgaagttatgggcccacgcgtgaagagcggttaccagagctggtcacctttgtccaccaagatggaactgtcttcggccagaatggcctccggaatttatcgctatcaactttgtatagaaaagttgggccgaattcgagctcggtacggccagaatggcccggaccgggttaccgaattcgagctcggtaccctgggatccggtgcgggcctcttcgctattacgccagctggcgaaagggggatgtgctgcaaggcgattaagttgggtaacgccagggttttcccagtcacgacgttgtaaaacgacggccagtgccaagctcagatcagcttgcatgcctgcagtgcagcgtgacccggtcgtgcccctctctagagataatgagcattgcatgtctaagttataaaaaattaccacatattttttttgtcacacttgtttgaagtgcagtttatctatctttatacatatatttaaactttactctacgaataatataatctatagtactacaataatatcagtgttttagagaatcatataaatgaacagttagacatggtctaaaggacaattgagtattttgacaacaggactctacagttttatctttttagtgtgcatgtgttctcctttttttttgcaaatagcttcacctatataatacttcatccattttattagtacatccatttagggtttagggttaatggtttttatagactaatttttttagtacatctattttattctattttagcctctaaattaagaaaactaaaactctattttagtttttttatttaataatttagatataaaatagaataaaataaagtgactaaaaattaaacaaataccctttaagaaattaaaaaaactaaggaaacatttttcttgtttcgagtagataatgccagcctgttaaacgccgtcgacgagtctaacggacaccaaccagcgaaccagcagcgtcgcgtcgggccaagcgaagcagacggcacggcatctctgtcgctgcctctggacccctctcgagagttccgctccaccgttggacttgctccgctgtcggcatccagaaattgcgtggcggagcggcagacgtgagccggcacggcaggcggcctcctcctcctctcacggcaccggcagctacgggggattcctttcccaccgctccttcgctttcccttcctcgcccgccgtaataaatagacaccccctccacaccctctttccccaacctcgtgttgttcggagcgcacacacacacaaccagatctcccccaaatccacccgtcggcacctccgcttcaaggtacgccgctcgtcctcccccccccccctctctaccttctctagatcggcgttccggtccatgcatggttagggcccggtagttctacttctgttcatgtttgtgttagatccgtgtttgtgttagatccgtgctgctagcgttcgtacacggatgcgacctgtacgtcagacacgttctgattgctaacttgccagtgtttctctttggggaatcctgggatggctctagccgttccgcagacgggatcgatttcatgattttttttgtttcgttgcatagggtttggtttgcccttttcctttatttcaatatatgccgtgcacttgtttgtcgggtcatcttttcatgcttttttttgtcttggttgtgatgatgtggtctggttgggcggtcgttctagatcggagtagaattctgtttcaaactacctggtggatttattaattttggatctgtatgtgtgtgccatacatattcatagttacgaattgaagatgatggatggaaatatcgatctaggataggtatacatgttgatgcgggttttactgatgcatatacagagatgctttttgttcgcttggttgtgatgatgtggtgtggttgggcggtcgttcattcgttctagatcggagtagaatactgtttcaaactacctggtgtatttattaattttggaactgtatgtgtgtgtcatacatcttcatagttacgagtttaagatggatggaaatatcgatctaggataggtatacatgttgatgtgggttttactgatgcatatacatgatggcatatgcagcatctattcatatgctctaaccttgagtacctatctattataataaacaagtatgttttataattattttgatcttgatatacttggatgatggcatatgcagcagctatatgtggatttttttagccctgccttcatacgctatttatttgcttggtactgtttcttttgtcgatgctcaccctgttgtttggtgttacttctgcaggtcgactctagaggatccaccggtcgccaccatggcaccgaagaagaagcgcaaggtgatggacaagaagtacagcatcggcctcgacatcggcaccaactcggtgggctgggccgtcatcacggacgaatataaggtcccgtcgaagaagttcaaggtcctcggcaatacagaccgccacagcatcaagaaaaacttgatcggcgccctcctgttcgatagcggcgagaccgcggaggcgaccaggctcaagaggaccgccaggagacggtacactaggcgcaagaacaggatctgctacctgcaggagatcttcagcaacgagatggcgaaggtggacgactccttcttccaccgcctggaggaatcattcctggtggaggaggacaagaagcatgagcggcacccaatcttcggcaacatcgtcgacgaggtaagtttctgcttctacctttgatatatatataataattatcattaattagtagtaatataatatttcaaatatttttttcaaaataaaagaatgtagtatatagcaattgcttttctgtagtttataagtgtgtatattttaatttataacttttctaatatatgaccaaaacatggtgatgtgcaggtggcctaccacgagaagtacccgacaatctaccacctccggaagaaactggtggacagcacagacaaggcggacctccggctcatctaccttgccctcgcgcatatgatcaagttccgcggccacttcctcatcgagggcgacctgaacccggacaactccgacgtggacaagctgttcatccagctcgtgcagacgtacaatcaactgttcgaggagaaccccataaacgctagcggcgtggacgccaaggccatcctctcggccaggctctcgaaatcaagaaggctggagaaccttatcgcgcagttgccaggcgaaaagaagaacggcctcttcggcaaccttattgcgctcagcctcggcctgacgccgaacttcaaatcaaacttcgacctcgcggaggacgccaagctccagctctcaaaggacacctacgacgacgacctcgacaacctcctggcccagataggagaccagtacgcggacctcttcctcgccgccaagaacctctccgacgctatcctgctcagcgacatccttcgggtcaacaccgaaattaccaaggcaccgctgtccgccagcatgattaaacgctacgacgagcaccatcaggacctcacgctgctcaaggcactcgtccgccagcagctccccgagaagtacaaggagatcttcttcgaccaatcaaaaaacggctacgcgggatatatcgacggcggtgccagccaggaagagttctacaagttcatcaaaccaatcctggagaagatggacggcaccgaggagttgctggtcaagctcaacagggaggacctcctcaggaagcagaggaccttcgacaacggctccatcccgcatcagatccacctgggcgaactgcatgccatcctgcggcgccaggaggacttctacccgttcctgaaggataaccgggagaagatcgagaagatcttgacgttccgcatcccatactacgtgggcccgctggctcgcggcaactcccggttcgcctggatgacccggaagtcggaggagaccatcacaccctggaactttgaggaggtggtcgataagggcgctagcgctcagagcttcatcgagcgcatgaccaacttcgataaaaacctgcccaatgaaaaagtcctccccaagcactcgctgctctacgagtacttcaccgtgtacaacgagctcaccaaggtcaaatacgtcaccgagggcatgcggaagccggcgttcctgagcggcgagcagaagaaggcgatagtggacctcctcttcaagaccaacaggaaggtgaccgtgaagcaattaaaagaggactacttcaagaaaatagagtgcttcgactccgtggagatctcgggcgtggaggatcggttcaacgcctcactcggcacgtatcacgacctcctcaagatcattaaagacaaggacttcctcgacaacgaggagaacgaggacatcctcgaggacatcgtcctcaccctgaccctgttcgaggaccgcgaaatgatcgaggagaggctgaagacctacgcgcacctgttcgacgacaaggtcatgaaacagctcaagaggcgccgctacactggttggggaaggctgtcccgcaagctcattaatggcatcagggacaagcagagcggcaagaccatcctggacttcctcaagtccgacgggttcgccaaccgcaacttcatgcagctcattcacgacgactcgctcacgttcaaggaagacatccagaaggcacaggtgagcgggcagggtgactccctccacgaacacatcgccaacctggccggctcgccggccattaaaaagggcatcctgcagacggtcaaggtcgtcgacgagctcgtgaaggtgatgggccggcacaagcccgaaaatatcgtcatagagatggccagggagaaccagaccacccaaaaagggcagaagaactcgcgcgagcggatgaaacggatcgaggagggcattaaagagctcgggtcccagatcctgaaggagcaccccgtggaaaatacccagctccagaatgaaaagctctacctctactacctgcagaacggccgcgacatgtacgtggaccaggagctggacattaatcggctatcggactacgacgtcgaccacatcgtgccgcagtcgttcctcaaggacgatagcatcgacaacaaggtgctcacccggtcggataaaaatcggggcaagagcgacaacgtgcccagcgaggaggtcgtgaagaagatgaaaaactactggcgccagctcctcaacgcgaaactgatcacccagcgcaagttcgacaacctgacgaaggcggaacgcggtggcttgagcgaactcgataaggcgggcttcataaaaaggcagctggtcgagacgcgccagatcacgaagcatgtcgcccagatcctggacagccgcatgaatactaagtacgatgaaaacgacaagctgatccgggaggtgaaggtgatcacgctgaagtccaagctcgtgtcggacttccgcaaggacttccagttctacaaggtccgcgagatcaacaactaccaccacgcccacgacgcctacctgaatgcggtggtcgggaccgccctgatcaagaagtacccgaagctggagtcggagttcgtgtacggcgactacaaggtctacgacgtgcgcaaaatgatcgccaagtccgagcaggagatcggcaaggccacggcaaaatacttcttctactcgaacatcatgaacttcttcaagaccgagatcaccctcgcgaacggcgagatccgcaagcgcccgctcatcgaaaccaacggcgagacgggcgagatcgtctgggataagggccgggatttcgcgacggtccgcaaggtgctctccatgccgcaagtcaatatcgtgaaaaagacggaggtccagacgggcgggttcagcaaggagtccatcctcccgaagcgcaactccgacaagctcatcgcgaggaagaaggattgggacccgaaaaaatatggcggcttcgacagcccgaccgtcgcatacagcgtcctcgtcgtggcgaaggtggagaagggcaagtcaaagaagctcaagtccgtgaaggagctgctcgggatcacgattatggagcggtcctccttcgagaagaacccgatcgacttcctagaggccaagggatataaggaggtcaagaaggacctgattattaaactgccgaagtactcgctcttcgagctggaaaacggccgcaagaggatgctcgcctccgcaggcgagttgcagaagggcaacgagctcgccctcccgagcaaatacgtcaatttcctgtacctcgctagccactatgaaaagctcaagggcagcccggaggacaacgagcagaagcagctcttcgtggagcagcacaagcattacctggacgagatcatcgagcagatcagcgagttctcgaagcgggtgatcctcgccgacgcgaacctggacaaggtgctgtcggcatataacaagcaccgcgacaaaccaatacgcgagcaggccgaaaatatcatccacctcttcaccctcaccaacctcggcgctccggcagccttcaagtacttcgacaccacgattgaccggaagcggtacacgagcacgaaggaggtgctcgatgcgacgctgatccaccagagcatcacagggctctatgaaacacgcatcgacctgagccagctgggcggagacaagagaccacgggaccgccacgatggcgagctgggaggccgcaagcgggcaaggtaggtaccgttaacctagacttgtccatcttctggattggccaacttaattaatgtatgaaataaaaggatgcacacatagtgacatgctaatcactataatgtgggcatcaaagttgtgtgttatgtgtaattactagttatctgaataaaagagaaagagatcatccatatttcttatcctaaatgaatgtcacgtgtctttataattctttgatgaaccagatgcatttcattaaccaaatccatatacatataaatattaatcatatataattaatatcaattgggttagcaaaacaaatctagtctaggtgtgttttgcgaattcgtaatcatgtcatagctgtttcctgtgtgaaattgttatccgctcacaattccacacaacatacgagccggaagcataaagtgtaaagcctggggtgcctaatgagtgagctaactcacattaattgcgttgcgctcactgcccgctttccagtcgggaaacctgtcgtgccagctgcattaatgaatcggccaacgcgcggggagaggcggtttgcgtattgggcgctcttccgctgatccgatatcgatgggccctggccgaagcttggtcacccggtccgggcctagaaggccagcttcaagtttgtacaaaaaagcaggctccggccagaatggcccggaccgggttaccgaattcgagctcggtaccctgggatccgatatcgatgggccctggccgaagctttgagagtacaatgatgaacctagattaatcaatgccaaagtctgaaaaatgcaccctcagtctatgatccagaaaatcaagattgcttgaggccctgttcggttgttccggattagagccccggattaattcctagccggattacttctctaatttatatagattttgatgagctggaatgaatcctggcttattccggtacaaccgaacaggccctgaaggataccagtaatcgctgagctaaattggcatgctgtcagagtgtcagtattgcagcaaggtagtgagataaccggcatcatggtgccagtttgatggcaccattagggttagagatggtggccatgggcgcatgtcctggccaactttgtatgatatatggcagggtgaataggaaagtaaaattgtattgtaaaaagggatttcttctgtttgttagcgcatgtacaaggaatgcaagttttgagcgagggggcatcaaagatctggctgtgtttccagctgtttttgttagccccatcgaatccttgacataatgatcccgcttaaataagcaacctcgcttgtatagttccttgtgctctaacacacgatgatgataagtcgtaaaatagtggtgtccaaagaatttccaggcccagttgtaaaagctaaaatgctattcgaatttctactagcagtaagtcgtgtttagaaattatttttttatataccttttttccttctatgtacagtaggacacagtgtcagcgccgcgttgacggagaatatttgcaaaaaagtaaaagagaaagtcatagcggcgtatgtgccaaaaacttcgtcacagagagggccataagaaacatggcccacggcccaatacgaagcaccgcgacgaagcccaaacagcagtccgtaggtggagcaaagcgctgggtaatacgcaaacgttttgtcccaccttgactaatcacaagagtggagcgtaccttataaaccgagccgcaagcaccgaattgtgatgcatccggacggggttttagagctagaaatagcaagttaaaataaggctagtccgttatcaacttgaaaaagtggcaccgagtcggtgctttttttttgcggccgcgaattcctgcagggccctcttgtcggaccagttgcccaccacgttggtgaggggcacccagctttcttgtacaaagtggccgttaacggatcggccagaatggcccggaccgggttaccgaattcgagctcggtaccctgggatccgatatcgatgggccctggccgaagctttgagagtacaatgatgaacctagattaatcaatgccaaagtctgaaaaatgcaccctcagtctatgatccagaaaatcaagattgcttgaggccctgttcggttgttccggattagagccccggattaattcctagccggattacttctctaatttatatagattttgatgagctggaatgaatcctggcttattccggtacaaccgaacaggccctgaaggataccagtaatcgctgagctaaattggcatgctgtcagagtgtcagtattgcagcaaggtagtgagataaccggcatcatggtgccagtttgatggcaccattagggttagagatggtggccatgggcgcatgtcctggccaactttgtatgatatatggcagggtgaataggaaagtaaaattgtattgtaaaaagggatttcttctgtttgttagcgcatgtacaaggaatgcaagttttgagcgagggggcatcaaagatctggctgtgtttccagctgtttttgttagccccatcgaatccttgacataatgatcccgcttaaataagcaacctcgcttgtatagttccttgtgctctaacacacgatgatgataagtcgtaaaatagtggtgtccaaagaatttccaggcccagttgtaaaagctaaaatgctattcgaatttctactagcagtaagtcgtgtttagaaattatttttttatataccttttttccttctatgtacagtaggacacagtgtcagcgccgcgttgacggagaatatttgcaaaaaagtaaaagagaaagtcatagcggcgtatgtgccaaaaacttcgtcacagagagggccataagaaacatggcccacggcccaatacgaagcaccgcgacgaagcccaaacagcagtccgtaggtggagcaaagcgctgggtaatacgcaaacgttttgtcccaccttgactaatcacaagagtggagcgtaccttataaaccgagccgcaagcaccgaattgaaggggcttcggaggatgttttagagctagaaatagcaagttaaaataaggctagtccgttatcaacttgaaaaagtggcaccgagtcggtgctttttttttgcggccgcgaattcctgcagggccctcttgtcggaccagttgcccaccacgttggtgaggggcaactttattatacaaagttgatagataatacgcgtctatagtattttaaaattgcattaacaaacatgtcctaattggtactcctgagatactataccctcctgttttaaaatagttggcattatcgaattatcattttactttttaatgttttctcttcttttaatatattttatgaattttaatgtattttaaaatgttatgcagttcgctctggacttttctgctgcgcctacacttgggtgtactgggcctaaattcagcctgaccgaccgcctgcattgaataatggatgagcaccggtaaaatccgcgtacccaactttcgagaagaaccgagacgtggcgggccgggccaccgacgcacggcaccagcgactgcacacgtcccgccggcgtacgtgtacgtgctgttccctcactggccgcccaatccactcatgcatgcccacgtacacccctgccgtggcgcgcccagatcctaatcctttcgccgttctgcacttctgctgcctataaatggcggcatcgaccgtcacctgcttcaccaccggcgagccacatcgagaacacgatcgagcacacaagcacgaagactcgtttaggagaaaccacaaaccaccaagccgtgcaagcaccaggcttgggcacccgctccgggcttagaaggccagcttcaagtttgtacaaaaaagcaggcttcgaaggagatagaaccgatccaccatgtccaacctgctcacggttcaccagaaccttccggctcttccagtggacgcgacgtccgatgaagtcaggaagaacctcatggacatgttccgcgacaggcaagcgttcagcgagcacacctggaagatgctgctctccgtctgccgctcctgggctgcatggtgcaagctgaacaacaggaagtggttccccgctgagcccgaggacgtgagggattaccttctgtacctgcaagcgcgaggtttgtttctgcttctacctttgatatatatataataattatcattaattagtagtaatataatatttcaaatatttttttcaaaataaaagaatgtagtatatagcaattgcttttctgtagtttataagtgtgtatattttaatttataacttttctaatatatgaccaaaacatggtgatgcctaggtctggcagtgaagaccatccagcaacaccttggacaactgaacatgcttcacaggcgctccggcctcccgcgccccagcgactcgaacgccgtgagcctcgtcatgcgccgcatcaggaaggaaaacgtcgatgccggcgaaagggcaaagcaggccctcgcgttcgagaggaccgatttcgaccaggtccgcagcctgatggagaacagcgacaggtgccaggacattaggaacctggcgttcctcggaattgcatacaacacgctcctcaggatcgcggaaattgcccgcattcgcgtgaaggacattagccgcaccgacggcggcaggatgcttatccacattggcaggaccaagacgctcgtttccaccgcaggcgtcgaaaaggccctcagcctcggagtgaccaagctcgtcgaacgctggatctccgtgtccggcgtcgcggacgacccaaacaactacctcttctgccgcgtccgcaagaacggggtggctgcccctagcgccaccagccaactcagcacgagggccttggaaggtattttcgaggccacccaccgcctgatctacggcgcgaaggatgacagcggtcaacgctacctcgcatggtccgggcactccgcccgcgttggagctgctagggacatggcccgcgccggtgtttccatccccgaaatcatgcaggcgggtggatggacgaacgtgaacattgtcatgaactacattcgcaaccttgacagcgagacgggcgcaatggttcgcctcctggaagatggtgactgagctagacccagctttcttgtacaaagtggccgttaacggatccagacttgtccatcttctggattggccaacttaattaatgtatgaaataaaaggatgcacacatagtgacatgctaatcactataatgtgggcatcaaagttgtgtgttatgtgtaattactagttatctgaataaaagagaaagagatcatccatatttcttatcctaaatgaatgtcacgtgtctttataattctttgatgaaccagatgcatttcattaaccaaatccatatacatataaatattaatcatatataattaatatcaattgggttagcaaaacaaatctagtctaggtgtgttttgcgaatgcggccgccaccgcggcctaaggggtcaccggcctagaaggccatttaaatcagatatctggttcctaaggacccggcggaccgattaaactgattcggtccgacgcgttacctaataacttcgtatagcatacattatacgaagttattagctaactaactagtaagcttaagccatgggtcgacggatccgttaactcacttaagatgtactcgacaatggtgccctcataccggcatgtgtttcctagaaataatcaatatattgattgagatttatctcgatatatttctgaactatgttcatcatataaataactgaaaacatcaaatcgtaattttaaactcatgcttggtcaatacatagataatacaatattacttcatcatcccaatgatgtcctagcacaacctattgaatgttaatgtttggttgtgtgggggtgtgtttataacatagatgtgattatttgtgctttttgttgagtatatacatatatggtatgttgatttgatatagtgatggacacatgctttggccttggatattcaaatcacttgtacttgcacgaagcaaaacataatataagtttagaagtaaacttgtaactgtgtccaaacatgctcacacaaagtcatatcgcattatatttttttggtaaatattcaacacatgtattttttacaagaacccaaattttacagacaaatgcagcattgtagacatgtagaattctttgaagcatgtgaacttaacaacactaatgtcattaaatcaactggaccctatgagtaacaatttcgatattgcaaacaccaaattatggaacttatttgctgaaaaaattatgatcaatgtgaagtttaaattattataccataaatatatcaaagattttttttgaggaaggtaaaaattgcatggaatgggctgcccaacgtgatagctcacttttatgctaggtagcattaccaaagatgggaatgttctgatgaacaccaaacccactcaaataatatttatatttgggttgtttagttgtaaaagtgaagacccaagattaaagtaccaattgtcgatgccatacactagaagtgaagaatgttgttagcgttaggagtagatgtgtcaatggggaccgatactcgttatcgatgggccgcacgtaagcttgcatgcctgcagtgcagcgtgacccggtcgtgcccctctctagagataatgagcattgcatgtctaagttataaaaaattaccacatattttttttgtcacacttgtttgaagtgcagtttatctatctttatacatatatttaaactttactctacgaataatataatctatagtactacaataatatcagtgttttagagaatcatataaatgaacagttagacatggtctaaaggacaattgagtattttgacaacaggactctacagttttatctttttagtgtgcatgtgttctcctttttttttgcaaatagcttcacctatataatacttcatccattttattagtacatccatttagggtttagggttaatggtttttatagactaatttttttagtacatctattttattctattttagcctctaaattaagaaaactaaaactctattttagtttttttatttaataatttagatataaaatagaataaaataaagtgactaaaaattaaacaaataccctttaagaaattaaaaaaactaaggaaacatttttcttgtttcgagtagataatgccagcctgttaaacgccgtcgacgagtctaacggacaccaaccagcgaaccagcagcgtcgcgtcgggccaagcgaagcagacggcacggcatctctgtcgctgcctctggacccctctcgagagttccgctccaccgttggacttgctccgctgtcggcatccagaaattgcgtggcggagcggcagacgtgagccggcacggcaggcggcctcctcctcctctcacggcaccggcagctacgggggattcctttcccaccgctccttcgctttcccttcctcgcccgccgtaataaatagacaccccctccacaccctctttccccaacctcgtgttgttcggagcgcacacacacacaaccagatctcccccaaatccacccgtcggcacctccgcttcaaggtacgccgctcgtcctcccccccccccctctctaccttctctagatcggcgttccggtccatgcatggttagggcccggtagttctacttctgttcatgtttgtgttagatccgtgtttgtgttagatccgtgctgctagcgttcgtacacggatgcgacctgtacgtcagacacgttctgattgctaacttgccagtgtttctctttggggaatcctgggatggctctagccgttccgcagacgggatcgatttcatgattttttttgtttcgttgcatagggtttggtttgcccttttcctttatttcaatatatgccgtgcacttgtttgtcgggtcatcttttcatgcttttttttgtcttggttgtgatgatgtggtctggttgggcggtcgttctagatcggagtagaattctgtttcaaactacctggtggatttattaattttggatctgtatgtgtgtgccatacatattcatagttacgaattgaagatgatggatggaaatatcgatctaggataggtatacatgttgatgcgggttttactgatgcatatacagagatgctttttgttcgcttggttgtgatgatgtggtgtggttgggcggtcgttcattcgttctagatcggagtagaatactgtttcaaactacctggtgtatttattaattttggaactgtatgtgtgtgtcatacatcttcatagttacgagtttaagatggatggaaatatcgatctaggataggtatacatgttgatgtgggttttactgatgcatatacatgatggcatatgcagcatctattcatatgctctaaccttgagtacctatctattataataaacaagtatgttttataattattttgatcttgatatacttggatgatggcatatgcagcagctatatgtggatttttttagccctgccttcatacgctatttatttgcttggtactgtttcttttgtcgatgctcaccctgttgtttggtgttacttctgcaggtcgactctagaggatccaccatggttgaacaagatggattgcacgcaggttctccggccgcttgggtggagaggctattcggctatgactgggcacaacagacaatcggctgctctgatgccgccgtgttccggctgtcagcgcaggggcgcccggttctttttgtcaagaccgacctgtccggtgccctgaatgaactgcaggacgaggcagcgcggctatcgtggctggccacgacgggcgttccttgcgcagctgtgctcgacgttgtcactgaagcgggaagggactggctgctattgggcgaagtgccggggcaggatctcctgtcatctcaccttgctcctgccgagaaagtatccatcatggctgatgcaatgcggcggctgcatacgcttgatccggctacctgcccattcgaccaccaagcgaaacatcgcatcgagcgagcacgtactcggatggaagccggtcttgtcgatcaggatgatctggacgaagagcatcaggggctcgcgccagccgaactgttcgccaggctcaaggcgcgcatgcccgacggcgatgatctcgtcgtgacccatggcgatgcctgcttgccgaatatcatggtggaaaatggccgcttttctggattcatcgactgtggccggctgggtgtggcggaccgctatcaggacatagcgttggctacccgtgatattgctgaagagcttggcggcgaatgggctgaccgcttcctcgtgctttacggtatcgccgctcccgattcgcagcgcatcgccttctatcgccttcttgacgagttcttctgaggatccaccatggttaacctagacttgtccatcttctggattggccaacttaattaatgtatgaaataaaaggatgcacacatagtgacatgctaatcactataatgtgggcatcaaagttgtgtgttatgtgtaattactagttatctgaataaaagagaaagagatcatccatatttcttatcctaaatgaatgtcacgtgtctttataattctttgatgaaccagatgcatttcattaaccaaatccatatacatataaatattaatcatatataattaatatcaattgggttagcaaaacaaatctagtctaggtgtgttttgcgaatgcgaccttcttatgtgcttctagtctccaaatgtggttgatagttattttgctctaagatcaacagtaatgaagtataaatcatcgttgtggtgtgctactcggttaattgagcattaacacacacaaacatgacgaggatggtataatctccaaaaatgtgtactttgttaggtgggaccctatagccttgattaatgtgctatgttaggcatgcctggaaacgtgtgacgcatatgttttgtgaacctgttgatattatatgtgcttttatattaccatattttattaaaatactaatatttattactagtaagatataacattctatctagcttaaaaactaaccataaatattccataataactagatttaccaaactaatatactaaatatacataataaatacaaaattaacaagacaataatcaatatttatgagcttaatatatttagacattatggttggtcgacgataatcatgctaacttttcgtaattgcttgattgaaatatgcttagaataatgcctctttgttctacatggcaaatagggaccattatggtgtaacaccctgggaaccacaaacaccccgaaatgctactaaactacacaactaaccttcatatataaaatttcgacagcatctcctttgaaaatttgcatagacgtggaagcaacagagtataaacagatatcatgataagaaaacatactagacattaataatctgctagaaatgggaagaatcctaacttgacgactgcgtaactgactagagtcacacttagctgaccctagtcacttacaactgacttcgtgtcctagggcgatccgatatcgatgggccctggccgaagcttggtcacccggtccgggcctagaaggccagcttcggccgccccaattcccatggagtcaaagattcaaatagaggacctaacagaactcgccgtaaagactggcgaacagttcatacagagtctcttacgactcaatgacaagaagaaaatcttcgtcaacatggtggagcacgacacgcttgtctactccaaaaatatcaaagatacagtctcagaagaccaaagggcaattgagacttttcaacaaagggtaatatccggaaacctcctcggattccattgcccagctatctgtcactttattgtgaagatagtggaaaaggaaggtggctcctacaaatgccatcattgcgataaaggaaaggccatcgttgaagatgcctctgccgacagtggtcccaaagatggacccccacccacgaggagcatcgtggaaaaagaagacgttccaaccacgtcttcaaagcaagtggattgatgtgatatctccactgacgtaagggatgacgcacaatcccactaagctgaccgaagctggccgctctagaactagtggatctcgatgtgtagtctacgagaagggttaaccgtctcttcgtgagaataaccgtggcctaaaaataagccgatgaggataaataaaatgtggtggtacagtacttcaagaggtttactcatcaagaggatgcttttccgatgagctctagtagtacatcggacctcacatacctccattgtggtgaaatattttgtgctcatttagtgatgggtaaattttgtttatgtcactctaggttttgacatttcagttttgccactcttaggttttgacaaataatttccattccgcggcaaaagcaaaacaattttattttacttttaccactcttagctttcacaatgtatcacaaatgccactctagaaattctgtttatgccacagaatgtgaaaaaaaacactcacttatttgaagccaaggtgttcatggcatggaaatgtgacataaagtaacgttcgtgtataagaaaaaattgtactcctcgtaacaagagacggaaacatcatgagacaatcgcgtttggaaggctttgcatcacctttggatgatgcgcatgaatggagtcgtctgcttgctagccttcgcctaccgcccactgagtccgggcggcaactaccatcggcgaacgacccagctgacctctaccgaccggacttgaatgcgctaccttcgtcagcgacgatggccgcgtacgctggcgacgtgcccccgcatgcatggcggcacatggcgagctcagaccgtgcgtggctggctacaaatacgtaccccgtgagtgccctagctagaaacttacacctgcaactgcgagagcgagcgtgtgagtgtagccgagtagatcccccgggctgcaggtcgactctagaggatccaccggtcgccaccatggccctgtccaacaagttcatcggcgacgacatgaagatgacctaccacatggacggctgcgtgaacggccactacttcaccgtgaagggcgagggcagcggcaagccctacgagggcacccagacctccaccttcaaggtgaccatggccaacggcggccccctggccttctccttcgacatcctgtccaccgtgttcatgtacggcaaccgctgcttcaccgcctaccccaccagcatgcccgactacttcaagcaggccttccccgacggcatgtcctacgagagaaccttcacctacgaggacggcggcgtggccaccgccagctgggagatcagcctgaagggcaactgcttcgagcacaagtccaccttccacggcgtgaacttccccgccgacggccccgtgatggccaagaagaccaccggctgggacccctccttcgagaagatgaccgtgtgcgacggcatcttgaagggcgacgtgaccgccttcctgatgctgcagggcggcggcaactacagatgccagttccacacctcctacaagaccaagaagcccgtgaccatgccccccaaccacgtggtggagcaccgcatcgccagaaccgacctggacaagggcggcaacagcgtgcagctgaccgagcacgccgtggcccacatcacctccgtggtgcccttctgaagcggcccatggatattcgaacgcgtcgctgaaatcaccagtctctctctacaaatctatctctctctataataatgtgtgagtagttcccagataagggaattagggttcttatagggtttcgctcatgtgttgagcatataagaaacccttagtatgtatttgtatttgtaaaatacttctatcaataaaatttctaattcctaaaaccaaaatccagtggcgagctcgagccagggtgcttcctgagctgattccgatgacttcgtaggttcctagctcaagccgctcgtgtccaagcgtcacttacgattagctaatgattacggcatctaggaccgactagctaactaactagtacgccgactagctagctaaggtaccgagctcgaattcattccgattaatcgtggcctcttgctcttcaggatgaagagctatgtttaaacgtgcaagcgctactagacaattcagtacattaaaaacgtccgcaatgtgttattaagttgtctaagcgtcaattt

SEQ ID NO: 190 - DNA, 17794 bp, synthetic construct
  misc_feature 1..17794: note = PHP90670
  source 1..17794: mol_type = other DNA
gtcagcatcatcacaccaaaagttaggcccgaatagtttgaaattagaaagctcgcaattgaggtctacaggccaaattcgctcttagccgtacaatattactcaccagatcctaaccggtgtgatcatgggccgcgattaaaaatctcaattatatttggtctaatttagtttggtattgagtaaaacaaattcggcgccatgcccggccatgcccgggtagggataacagggtaatagatggttcctgtgtgaggcggccgcctcgaggctggctagtcacgactcatggccaaaagtgaagagtcaagacagctttggcattttgtcatgaaatttctctaaccaagactggcaagaatgtgtatgtgtgttctccaatgatttggtgaacagatttaagaaccttgttaccgtatctacctcagctggtgtgatcaagttgctgtcatgcattgcatgccactgcctccaggaaacataaagctttcataagaattatgatcacagataatttatccttgtaaaaaaaacctagctaacatagtaataacctggatcacttatcactcaaataaataatatgaatctgagctatactacgagaacttctggattcagcaagaactagcagcaatcagaacccaatagcatagcaacaaaccgaacaatcaaccatatattaggagacggtagatagaaccacgttaacattaagggggtgtttgaatgcactgaaactaattgttagttggctaaaaattgttagttgaattagctagctaacaaataactacctcactattaactaattttccaaaaatagctaatagttcaactattagctatggtgtttggatgttttaactaattttagccactaactattagttttagtgcattcaaacacctcctaagtaagaaacggtagatagccagtacctgcaggcaaatattaggagacaactgaaagacagaacataatgagcacaggctttaatttcaaacatcaaacttattcatgatttgtcatagttctgggtagtacgcacacacaacacaaccggtccattattaaaccaacactgacacgactcatgacacgaacagcagatactttgacaacctccatatggagagagggcaccagacgacgcaggcacatcggcagcttaaacgacccatgacctaggtgattaagctaactacttagaagttgatctcgccgttattgaatttcctgcggacctcttccagcgtcagggtgccggccttgatcatctccccgccaatgagcagttcctcgacggagagcacagcgccattgcagttggtcttcctgttgaggcgcgtcagctgcgccttgtagttacccttgaaatgcccggagacaaacaggaatttgaactcggtcacggagcttggatacaccttccaccactcattcgggttaatgtgcttgttcctggtttggttttccttgacgtagcgctgcatctcatcggcctggccgattgggagattgtacccgccgctgtaagccttcgtgtcgacgatcacgccataatcgatcggggaacccacggtgtagatcgcgccgtctggcttcctgctaccccccaggtgtttgccgcgatagccgtacaccttcataaagaactccatgaccttcatttcgagaatcctgtcttgggtggagttgcgggcaatctcgatcagctcgatgtactcatgcgggacgtacttgagcttgtgcctgagttcgcttttcttctcttccagctccctggcagcggcctcgctcttgctcttgaccagctgggatccggatccccgcaggccgccgcagcgctgggcatggcgggccaggttgccggactgggcaaacttcctcccacaaatgtcacaggcaaaaggcttctcgcctgtgtgggtgcggatgtgctcggacagcacgtcggagcgactgaagttacgcatgcagattcgacactggaagggcttctgagatcccgtgtgtatcttggtatggcgggtcagggagccggaggtggcaaacttcctcccacaaatgtcacaggcaaaaggcttctcgcctgtgtgggtgcggatgtggcgggtcaggttgccggaggtactgaagttacgcatgcagattcgacactggaacggccgttgtccgcccgtgtgtatcttggtatgcttcttgcggtcgtcgttgcgggcaaacttcctcccacaaatgtcacaggcaaaaggcttctcgcctgtgtgggtgcggatgtggcgggacagggcggagcggtcactgaagttacgcatgcagattcgacactggaagggcctctcagccatggcggcggggggtaccccgtggatgcccaccttcctgtacctggacctcctggcggactccctgttggactccttcctcttcctcggggccatcctagggccgggattctcctccacgtcaccgcatgttagaagacttcctctgccctctccgccgccagatctgaagttgatctcgccgttattgaatttcctgcggacctcttccagcgtcagggtgccggccttgatcatctccccgccaatgagcagttcctcgacggagagcacagcgccattgcagttggtgatgtggttgaggcgcgtcagctgcgccttgtagttacccttgaaatgcccggagacaaacaggaatttgaactcggtcacggagcttggatacaccttccaccactcattcgggttcaggtgcttgtccctggtttggttttcctcgacgtagcgctccatctcatcggcctggccgattgggagattgtacccgccgctgtaagccttcgtgtcgacgatcacgccataatcgatcggggaacccacggtgtagatcgcgccgtctggcttcctgctaccccccaggtgtttgccgcgatagccgtacaccttcataaagaactccatgaccttcatttcgagaatcctgtcttgggtggagttgcgggcaatctcgatcagctcgatgtactcatgcgggacgtacttgagcttgtgcctgagttcgcttttcttctcttccagctccctggcagcggcctcgctcttgctcttgaccagctgggatccggatccccgcaggccgccgcagcgctgggcatgctgggtcagggcgtcggagcgggcaaacttcctcccacaaatgtcacaggcaaaaggcttctcgcctgtgtgggtgcggatgtggcgggccagggtgccgcgctcactgaagttacgcatgcagattcgacactggaagggcttctgagatcccgtgtgtatcttggtatgctttttgcgggtggcgctctgggcaaatttccttccacaaatgtcacaggcaaaaggcttctcgcctgtgtgggtgcggatgtgttcgctcaggtggtcactacgactgaagttacgcatgcagattcgacactggaagggcctctcagccatagcggcggggggtaccccgtggatgcccaccttcctgtacctggacctcctggcggactccctgttggactccttcctcttcctcggggccatggtgtcgtgtacctgcagaagtaacaccaaacaacagggtgagcatcgacaaaagaaacagtaccaagcaaataaatagcgtatgaaggcagggctaaaaaaatccacatatagctgctgcatatgccatcatccaagtatatcaagatcgaaataattataaaacatacttgtttattataatagataggtactcaaggttagagcatatgaatagatgctgcatatgccatcatgtatatgcatcagtaaaacccacatcaacatgtatacctatcctagatcgatatttccatccatcttaaactcgtaactatgaagatgtatgacacacacatacagttccaaaattaataaatacaccaggtagtttgaaacagtattctactccgatctagaacgaatgaacgaccgcccaaccacaccacatcatcacaaccaagcgaacaaaaagcatctctgtatatgcatcagtaaaacccgcatcaacatgtatacctatcctagatcgatatttccatccatcatcttcaattcgtaactatgaatatgtatggcacacacatacagatccaaaattaataaatccaccaggtagtttgaaacagaattctactccgatctagaacgaccgcccaaccagaccacatcatcacaaccaagacaaaaaaaagcatgaaaagatgacccgacaaacaagtgcacggcatatattgaaataaaggaaaagggcaaaccaaaccctatgcaacgaaacaaaaaaaatcatgaaatcgatcccgtctgcggaacggctagagccatcccaggattccccaaagagaaacactggcaagttagcaatcagaacgtgtctgacgtacaggtcgcatccgtgtacgaacgctagcagcacggatctaacacaaacacggatctaacacaaacatgaacagaagtagaactaccgggccctaaccatgcatggaccggaacgccgatctagagaaggtagagagggggggggggggggaggacgagcggcgtaccttgaagcggaggtgccgacgggtggatttgggggagatctggttgtgtgtgtgtgcgctccgaacaacacgaggttggggaaagagggtgtggagggggtgtctatttattacggcgggcgaggaagggaaagcgaaggagcggtgggaaaggaatcccccgtagctgccggtgccgtgagaggaggaggaggccgcctgccgtgccggctcacgtctgccgctccgccacgcaatttctggatgccgacagcggagcaagtccaacggtggagcggaactctcgagaggggtccagaggcagcgacagagatgccgtgccgtctgcttcgcttggcccgacgcgacgctgctggttcgctggttggtgtccgttagactcgtcgacggcgtttaacaggctggcattatctactcgaaacaagaaaaatgtttccttagtttttttaatttcttaaagggtatttgtttaatttttagtcactttattttattctattttatatctaaactattaaataaaaaaactaaaatagagttttagttttcttaatttagaggctaaaatagaataaaatagatgtactaaaaaaattagtctataaaaaccattaaccctaaaccctaaatggatgtactaataaaatggatgaagtattatataggtgaagctatttgcaaaaaaaaaggagaacacatgcacactaaaaagataaaactgtagagtcctgttgtcaaaatactcaattgtcctttagaccatgtctaactgttcatttatatgattctctaaaacactgatattattgtagtactatagattatattattcgtagagtaaagtttaaatatatgtataaagatagataaactgcacttcaaacaagtgtgacaaaaaaaatatgtggtaattttttataacttagacatgcaatgctcattatctctagagaggggcacgaccgggtcacgctgcactcacctttgtcatgcggccgctccggataaattcatccgactcaggttattgtttggcggccgcaagctgtactgaagcttgccgagtgccatccttggacactcgataaagtatattttattttttttattttgccaaccaaactttttgtggtatgttcctacactatgtagatctacatgtaccattttggcacaattacaaaaatgttttctataactattagatttagttcgtttatttgaatttcttcggaaaattcacatatgaactgcaagtcactcgaaacatgaaaaaccgtgcatgcaaaataaatgatatgcatgttatctagcacaagttacgaccgatttcagaagcagaccagaatcttcaagcaccatgctcactaaacatgaccgtgaacttgttatccagttgtttaaaaattgtataaaacacaaataaagtcagaaattaatgaaacttgtccacatgtcatgatatcatatatagaggttgtgataaaaatttgatattgtttcggtaaagttgtgacgtactatgtgtagaaacctaagtgacctacacataaaatcatagagtttcaatgtagttcactcgacaaagactttgtcaagtgtccgataaaaagtattcagcaaagaagccgttgtcgatttactgttcgtcgagatctctttgccgagtgtcacactaggcaaagtctttacggagtgtttttcaggctttgacactcggcaaagcgctcgattccagtagtgacagtaatttgcatcaaaaatagccgagagatttaaaatgagtcaactaatagaccaactaattattagctattagtcgttagcttctttaatctaagctaaaaccaactaatagcttatttgttgaattacaattagctcaacggaattctctgttttttctataaaaaagggaaactgcccctcatttacagcaaactgtccgctgcctgtcgtccagatacaatgaacgtacctagtaggaactcttttacacgctcggtcgctcgccgcggatcggagtcccaggaacacgacaccactgtggaacacgacaaagtctgctcagaggcggccacaccctggcgtgcaccgagccggagcccggataagcacggtaaggagagtacggcgggacgtggcgacccgtgtgtctgctgccacgcagccttcctccacgtagccgcgcggccgcgccacgtaccagggcccggcgctggtataaatgcgcgccacctccgctttagttctgcatacagccaacccaacacacacccgagcatatcacagtgacactacaccacaggtacctcttcctggagcaccagtgtccatggacgagagagcgagcgcgatggggaggagggcgtgttgcgcgaaggaaggcgttaagagaggggcgtggacgagcaaggaggacgatgccttggccgcctacgtcaaggcccatggcgaaggcaaatggagggaagtgccccagaaagccggtttgcgtcggtgcggcaagagctgccggctgcggtggctgaactacctccggcccaacatcaggcgcggcaacatctcctacgacgaggaggatctcatcatccgcctccacaggctcctcggcaacaggtggtcgctgattgcaggcaggctgcctggccgaacagacaatgaaatcaagaactactggaacagcacgctgggccggagggcaggcgccggcgccggcgccggcggcagctgggtcgtcgtcgcgccggacaccggctcgcacgccaccccggccgcgacgtcgggcgcctgcgagacgggccagaatagcgccgctcatcgcgcggaccccgactcagccgggacgacgacgacctcggcggcggcggtgtgggcgcccaaggccgtgcggtgcacgggcggactcttcttcttccaccgggacacgacgccggcgcacgcgggcgagacggcgacgccaatggccggtggaggtggaggaggaggaggagaagcagggtcgtcggacgactgcagctcggcggcgtcggtatcgcttcgcgtcggaagccacgacgagccgtgcttctccggcgacggtgacggcgactggatggacgacgtgagggccctggcgtcgtttctcgagtccgacgaggactggctccgctgtcagacggccgggcagcttgcgtaataatgagtagttagcttaatcacctagatcgttcaaacatttggcaataaagtttcttaagattgaatcctgttgccggtcttgcgatgattatcatataatttctgttgaattacgttaagcatgtaataattaacatgtaatgcatgacgttatttatgagatgggtttttatgattagagtcccgcaattatacatttaatacgcgatagaaaacaaaatatagcgcgcaaactaggataaattatcgcgcgcggtgtcatctatgttactagatcgtagttccctcattcactagctgcggccgctgcgaagtagtcaagggtcgcggccgcgtgaagtcgattccttctgaagcttgccgagtgccatccttggacactcgataaagtatattttattttttttattttgccaaccaaactttttgtggtatgttcctacactatgtagatctacatgtaccattttggcacaattacaaaaatgttttctataactattagatttagttcgtttatttgaatttcttcggaaaattcacatatgaactgcaagtcactcgaaacatgaaaaaccgtgcatgcaaaataaatgatatgcatgttatctagcacaagttacgaccgatttcagaagcagaccagaatcttcaagcaccatgctcactaaacatgaccgtgaacttgttatccagttgtttaaaaattgtataaaacacaaataaagtcagaaattaatgaaacttgtccacatgtcatgatatcatatatagaggttgtgataaaaatttgatattgtttcggtaaagttgtgacgtactatgtgtagaaacctaagtgacctacacataaaatcatagagtttcaatgtagttcactcgacaaagactttgtcaagtgtccgataaaaagtattcagcaaagaagccgttgtcgatttactgttcgtcgagatctctttgccgagtgtcacactaggcaaagtctttacggagtgtttttcaggctttgacactcggcaaagcgctcgattccagtagtgacagtaatttgcatcaaaaatagccgagagatttaaaatgagtcaactaatagaccaactaattattagctattagtcgttagcttctttaatctaagctaaaaccaactaatagcttatttgttgaattacaattagctcaacggaattctctgttttttctataaaaaagggaaactgcccctcatttacagcaaactgtccgctgcctgtcgtccagatacaatgaacgtacctagtaggaactcttttacacgctcggtcgctcgccgcggatcggagtcccaggaacacgacaccactgtggaacacgacaaagtctgctcagaggcggccacaccctggcgtgcaccgagccggagcccggataagcacggtaaggagagtacggcgggacgtggcgacccgtgtgtctgctgccacgcagccttcctccacgtagccgcgcggccgcgccacgtaccagggcccggcgctggtataaatgcgcgccacctccgctttagttctgcatacagccaacccaacacacacccgagcatatcacagtgacactacaccacaggtacctcttcctggagcaccagtgtccatgctgtggggccatatcccagaactggttgagtcggtcgtctcaccgcggcttggggattggatacggagctagttaaccagcagagctagatagcagacgcagatcgcttgcttctctggtttgatttttggagtcaccatttctgtttggttcgtgtgcctcagtgtctgacagcagcagatcctcgatggagatggatggggttctgcaagccgcggatgccaaggactgggtttacaagggggaaggcgccgcgaatctcatcctcagctacaccggcacgtcgccctccatggtaagcgctgagtaggttcttactgagtgtgcacgcatcgatcacttgactttaggggctcaatgtgtgattcacgggtgccgccattcgagctccagatccagtatcgctcgagcaagtgataaaacatggagcagggacgatcacgtggtcacttgaaaattatgtgaggtccggggcgacgatgtacggcgcggcgaactctcaaacactcacacagccaaaaccgcttcgtgttcgtctttgttccaagcgaccgtgtggtgtgtttgtagtagttcgccggcgccgcacatcgtcgccccggatctgacaaattaagctttcgttgcttttccacgattgtgcattttctgagcatgcactgaatactatgatggatatgtttggaggaagcattattccaatttgatgataatggtgttatttacacttgttttcagcttggcaaggtactgcggctcaagaagattctaaaaaacaagttgcagcgggcaccaagttgtattgccttctcaagtcatgagcaactcctgtggggccatatcagtagtggcggcggagagggcagaggaagtcttctaacatgcggtgacgtggaggagaatcccggccctaggatgcctggcaccgctgaggtgcaagtgaggcctggcgtggaggaggacctgaaaccgctgaccgacctgtacaaccactacgtgagggagactccgatcaccttcgacaccgagccgttcaccccagaggagaggaggccgtggctgctgtcccaccctgaggacggtccgtataggctgagggtggcgaccgacgctgagtcccaagagatcctgggctacgccacctcctctccgtacagagccaagccagcgtacgccacctccgtggagacgaccgtgtacgtggctcctggagctggtgggaggggaatcggcagcctgctgtacgcctccctgttcgacgcactcgcagccgaggacctgcacagagcgtacgctggaatagcgcagccgaacgaggcgtcagcgaggctgcacgcgaggttcggctttaggcacgtgggcacctacagagaggtgggcagaaagttcggacgctactgggacgtggcctggtacgagaggcctctgtaagtagttagcttaatcacctagggtcgcagcgtgtgcgtgtccgtcgtacgttctggccggccgggccttgggcgcgcgatcagaagcgttgcgttggcgtgtgtgtgcttctggtttgctttaattttaccaagtttgtttcaaggtggatcgcgtggtcaaggcccgtgtgctttaaagacccaccggcactggcagtgagtgttgctgcttgtgtaggctttggtacgtatgggctttatttgcttctggatgttgtgtactacttgggtttgttgaattattatgagcagttgcgtattgtaattcagctgggctacctggacattgttatgtattaataaatgctttgctttcttctaaagatctttaagtgcttagtctatattgagcggccgctatatgaatgcaatcgaacaatggttaaagcggccgcaaacaaaggcttacttgactagtccagaactggttgagtcggtcaaacaagattgcttggctcaagcctatgcagtgcatgttatgagccaacacctgggtgccaatcatgtcgatggtggggtatggttcagattcagttcatttatgtcctgttattgtgattttgattggtaacatattgacaacctcgacacttgggatcagattcagttcacttatggaagaaattggagaattgtgataatttatctataatcacccctactgaaatagaaataacatgacatcaatgtgcatgctattggattttgacacgaatatgctttattctatcatatgttggtaattccagcaggcagcaggcactactctttggatccacgtgacttgacaaagaaatcatgccatctttccacaatgcaggtccgtgtacgtgtttctagggattttctggagcttgtcgaaaagaatgttcttagcagccgtcctgctgggagagtaaatgcaagttcaattgataacactgctgatgccggtcttctaatagcagaccactctttattttctggtacgtactctatccctcttcttaccataatctgaatcttgttaaggtttaaaatatatgattgattaagtaaaatccagagctctattcatatctcacgcactgatgttttgatgaaacgcttgcagcaagacggttgcctgttatttctatttgcattagacaaacagtcacctttgtttataaaggtctttgaatttgcagttcttataggtttaagtttgcaactgttacttacaacagcccaatgggtagcatcaaggctgtggggccatatcccagaactggttgagtcggtcccgacgagacacctcaaggacccatttaaatcgttattagtaaggcgcgtgatggcgctctcagcttccccggctcaggaagaactgctgcagcctgctgggaggccgttgaggaagcagcttgctgcagccgcgaggagcatcaactggagctatgccctcttctggtccatttcaagcactcaacgacctcgggtgctgacgtggacggacgggttctacaatggcgaggtgaagacgcgtaagatctcccactccgtggagctgacagccgaccagctgctcatgcagaggagcgagcagctccgggagctctacgaggccctccggtccggcgagtgcgaccgccgcgcggcgcggccggtgggctcgctgtcgccggaggacctcggggacaccgagtggtactacgtgatctgcatgacctacgccttcctgccgggccaaggcttgcccggcaggagttccgcgagcaacgagcatgtctggctgtgcaacgcgcacctcgccggcagcaaggacttcccccgcgcgctcctggccaagagcgcgtccattcagacaatcgtctgcatcccgctcatgggtggcgtgcttgagcttggtactactgataaggtgccggaggacccggacttggtcagccgagcaaccgtagcattctgggagccgcaatgtccgacatactcgaaagagccgagctccaacccgtcagcatacgaaaccggggaagccgcatacatagtcgtgttggaggacctcgatcacaatgccatggacatggagacggtgactgccgccgccgggagacacggaaccggacaggagctaggagaagtcgagagcccgtcaaatgcaagcctggagcacatcaccaaggggatcgacgagttctacagcctctgcgaggaaatggacgtgcagccgctagaggatgcctggataatggacgggtctaatttcgaagtcccgtcgtcagcgctcccggtggatggctcaagcgcacccgctgatggttctcgcgcgacaagtttcgtggtttggacgaggtcatcgcactcctgctcgggtgaagcggcggcggtgccggtcatcgaggagccgcagaaattgctgaagaaagcgttggccggcggcggtgcttgggcgaacacgaactgcggtggcgggggcacgacggtaacagcccaggaaaacggcgccaagaaccacgtcatgtcagagcgaaagcgccgggagaagctcaacgagatgttcctcgttctcaagtcgttggttccctccattcacaaggtggacaaagcatccatcctcgccgaaacgatagcctatctaaaggagcttcaacgaagggtacaagaactggaatccaggaggcaaggtggcagtgggtgtgtcagcaagaaagtctgtgtgggctccaactccaagaggaagagtccagagttcgccggtggcgcgaaggagcacccctgggtcctccccatggacggcaccagcaacgtcaccgtcaccgtctcggacacgaacgtgctcctggaggtgcaatgccggtgggagaagctcctgatgacacgggtgttcgacgccatcaagagcctccatttggacgctctctcggttcaggcttcggcaccagatggcttcatgaggctcaagataggagctcagtttgcaggctccggcgccgtcgtgcccggaatgatcagccaatctcttcgtaaagctatagggaagcgataataatgagtagttagcttaatcacctagatcgttcaaacatttggcaataaagtttcttaagattgaatcctgttgccggtcttgcgatgattatcatataatttctgttgaattacgttaagcatgtaataattaacatgtaatgcatgacgttatttatgagatgggtttttatgattagagtcccgcaattatacatttaatacgcgatagaaaacaaaatatagcgcgcaaactaggataaattatcgcgcgcggtgtcatctatgttactagatcgtagtagaagagggcacttaagcggccgcaattaggagcgtgtgcagactggaacgcccatgcggccgcctaactgagtgcagcgtgacccggtcgtgcccctctctagagataatgagcattgcatgtctaagttataaaaaattaccacatattttttttgtcacacttgtttgaagtgcagtttatctatctttatacatatatttaaactttactctacgaataatataatctatagtactacaataatatcagtgttttagagaatcatataaatgaacagttagacatggtctaaaggacaattgagtattttgacaacaggactctacagttttatctttttagtgtgcatgtgttctcctttttttttgcaaatagcttcacctatataatacttcatccattttattagtacatccatttagggtttagggttaatggtttttatagactaatttttttagtacatctattttattctattttagcctctaaattaagaaaactaaaactctattttagtttttttatttaatagtttagatataaaatagaataaaataaagtgactaaaaattaaacaaataccctttaagaaattaaaaaaactaaggaaacatttttcttgtttcgagtagataatgccagcctgttaaacgccgtcgacgagtctaacggacaccaaccagcgaaccagcagcgtcgcgtcgggccaagcgaagcagacggcacggcatctctgtcgctgcctctggacccctctcgagagttccgctccaccgttggacttgctccgctgtcggcatccagaaattgcgtggcggagcggcagacgtgagccggcacggcaggcggcctcctcctcctctcacggcaccggcagctacgggggattcctttcccaccgctccttcgctttcccttcctcgcccgccgtaataaatagacaccccctccacaccctctttccccaacctcgtgttgttcggagcgcacacacacacaaccagatctcccccaaatccacccgtcggcacctccgcttcaaggtacgccgctcgtcctccccccccccccccctctctaccttctctagatcggcgttccggtccatgcatggttagggcccggtagttctacttctgttcatgtttgtgttagatccgtgtttgtgttagatccgtgctgctagcgttcgtacacggatgcgacctgtacgtcagacacgttctgattgctaacttgccagtgtttctctttggggaatcctgggatggctctagccgttccgcagacgggatcgatttcatgattttttttgtttcgttgcatagggtttggtttgcccttttcctttatttcaatatatgccgtgcacttgtttgtcgggtcatcttttcatgcttttttttgtcttggttgtgatgatgtggtctggttgggcggtcgttctagatcggagtagaattctgtttcaaactacctggtggatttattaattttggatctgtatgtgtgtgccatacatattcatagttacgaattgaagatgatggatggaaatatcgatctaggataggtatacatgttgatgcgggttttactgatgcatatacagagatgctttttgttcgcttggttgtgatgatgtggtgtggttgggcggtcgttcattcgttctagatcggagtagaatactgtttcaaactacctggtgtatttattaattttggaactgtatgtgtgtgtcatacatcttcatagttacgagtttaagatggatggaaatatcgatctaggataggtatacatgttgatgtgggttttactgatgcatatacatgatggcatatgcagcatctattcatatgctctaaccttgagtacctatctattataataaacaagtatgttttataattatttcgatcttgatatacttggatgatggcatatgcagcagctatatgtggatttttttagccctgccttcatacgctatttatttgcttggtactgtttcttttgtcgatgctcaccctgttgtttggtgttacttctgcaggtacacgacaccatggctcatgctgccctcagccctctctcccaacgctttgagagaatagctgtccagccactcactggtgtccttggtgctgagatcactggagtggacttgagggaaccacttgatgacagcacctggaatgagatattggatgccttccacacttaccaagtcatctactttcctggccaagcaatcaccaatgagcagcacattgcattctcaagaaggtttggaccagttgatccagtgcctcttctcaagagcattgaaggctatccagaggttcagatgatccgcagagaagccaatgagtctggaagggtgattggtgatgactggcacacagactccactttccttgatgcacctccagctgctgttgtgatgagggccatagatgttcctgagcatggcggagacactgggttcctttcaatgtacacagcttgggagacgttgtctccaaccatgcaagccaccatcgaagggctcaacgttgtgcactctgccacacgtgtgttcggttccctctaccaagcacagaaccgtcgcttcagcaacacctcagtcaaggtgatggatgttgatgctggtgacagagagacagtccatcccttggttgtgactcatcctggctctggaaggaaaggcctttatgtgaatcaagtctactgtcagagaattgagggcatgacagatgcagaatcaaagccattgcttcagttcctctatgagcatgccaccagatttgacttcacttgccgtgtgaggtggaagaaagaccaagtccttgtctgggacaacttgtgcaccatgcaccgtgctgttcctgactatgctggcaagttcagatacttgactcgcaccacagttggtggagttaggcctgcccgctaataagtagttagcttaatcacctagggtcgcagcgtgtgcgtgtccgtcgtacgttctggccggccgggccttgggcgcgcgatcagaagcgttgcgttggcgtgtgtgtgcttctggtttgctttaattttaccaagtttgtttcaaggtggatcgcgtggtcaaggcccgtgtgctttaaagacccaccggcactggcagtgagtgttgctgcttgtgtaggctttggtacgtatgggctttatttgcttctggatgttgtgtactacttgggtttgttgaattattatgagcagttgcgtattgtaattcagctgggctacctggacattgttatgtattaataaatgctttgctttcttctaaagatctttaagtgcttaggtagttaatattgcggccgcttatattccatttaatcattaccctgttatccctagcggccgcttaggccgcttacacatagacacacacatcatctcattgatgcttggtaataattgtcattagattgtttttatgcatagatgcactcgaaatcagccaattttagacaagtatcaaacggatgtgacttcagtacattaaaaacgtccgcaatgtgttattaagttgtctaagcgtcaatttg

SEQ ID NO: 191 - DNA, 17194 bp, synthetic construct
  misc_feature 1..17194: note = RV025340
  source 1..17194: mol_type = other DNA
gtcagcatcatcacaccaaaagttaggcccgaatagtttgaaattagaaagctcgcaattgaggtctacaggccaaattcgctcttagccgtacaatattactcaccagatcctaaccggtgtgatcatgggccgcgattaaaaatctcaattatatttggtctaatttagtttggtattgagtaaaacaaattcggcgccatgcccggccatgcccgggtagggataacagggtaatagatggttcctgtgtgaggcggccgcctcgaggctggctagtcacgactcatggccaaaagtgaagagtcaagacagctttggcattttgtcatgaaatttctctaaccaagactggcaagaatgtgtatgtgtgttctccaatgatttggtgaacagatttaagaaccttgttaccgtatctacctcagctggtgtgatcaagttgctgtcatgcattgcatgccactgcctccaggaaacataaagctttcataagaattatgatcacagataatttatccttgtaaaaaaaacctagctaacatagtaataacctggatcacttatcactcaaataaataatatgaatctgagctatactacgagaacttctggattcagcaagaactagcagcaatcagaacccaatagcatagcaacaaaccgaacaatcaaccatatattaggagacggtagatagaaccacgttaacattaagggggtgtttgaatgcactgaaactaattgttagttggctaaaaattgttagttgaattagctagctaacaaataactacctcactattaactaattttccaaaaatagctaatagttcaactattagctatggtgtttggatgttttaactaattttagccactaactattagttttagtgcattcaaacacctcctaagtaagaaacggtagatagccagtacctgcaggcaaatattaggagacaactgaaagacagaacataatgagcacaggctttaatttcaaacatcaaacttattcatgatttgtcatagttctgggtagtacgcacacacaacacaaccggtccattattaaaccaacactgacacgactcatgacacgaacagcagatactttgacaacctccatatggagagagggcaccagacgacgcaggcacatcggcagcttaaacgacccatgacctaggtgattaagctaactacttagaagttgatctcgccgttattgaatttcctgcggacctcttccagcgtcagggtgccggccttgatcatctccccgccaatgagcagttcctcgacggagagcacagcgccattgcagttggtcttcctgttgaggcgcgtcagctgcgccttgtagttacccttgaaatgcccggagacaaacaggaatttgaactcggtcacggagcttggatacaccttccaccactcattcgggttaatgtgcttgttcctggtttggttttccttgacgtagcgctgcatctcatcggcctggccgattgggagattgtacccgccgctgtaagccttcgtgtcgacgatcacgccataatcgatcggggaacccacggtgtagatcgcgccgtctggcttcctgctaccccccaggtgtttgccgcgatagccgtacaccttcataaagaactccatgaccttcatttcgagaatcctgtcttgggtggagttgcgggcaatctcgatcagctcgatgtactcatgcgggacgtacttgagcttgtgcctgagttcgcttttcttctcttccagctccctggcagcggcctcgctcttgctcttgaccagctgggatccccgcagtccgcagcgttgggcatgctttgtgcggttggcgctctgcgcaaactttctcccacagatgtcgcaggcgaatggcttctcaccggtgtgcgtccggatgtgccggctcaggtcgtcactacgggagaagttcctcatgcagatccggcactgaaacggtttctgtgaacccgtatggatctttgtgtggcgggtcaggttgccggaggtggcgaacttgcggccgcaaatgtcgcacgcaaacggcttttcgccagtgtgggtgcggatatggcgggacaggtgggagcggtcgctgaagttgcgcatacagatgcggcattggaaaggcttttccccggtgtgtatcttggtgtgggtcttgcggtcggcggagcgggcaaactttctcatgcaaatcctacactggaatggcctctccgccatagcagcgggtaccccgtggatgcccaccttcctgtacctggacctcctggcggactccctgttggactccttcctcttcctcggggccatcctagggccgggattctcctccacgtcaccgcatgttagaagacttcctctgccctctccgccgccagatctgaagttgatctcgccgttattgaatttcctgcggacctcttccagcgtcagggtgccggccttgatcatctccccgccaatgagcagttcctcgacggagagcacagcgccattgcagttggtgatgtggttgaggcgcgtcagctgcgccttgtagttacccttgaaatgcccggagacaaacaggaatttgaactcggtcacggagcttggatacaccttccaccactcattcgggttcaggtgcttgtccctggtttggttttcctcgacgtagcgctccatctcatcggcctggccgattgggagattgtacccgccgctgtaagccttcgtgtcgacgatcacgccataatcgatcggggaacccacggtgtagatcgcgccgtctggcttcctgctaccccccaggtgtttgccgcgatagccgtacaccttcataaagaactccatgaccttcatttcgagaatcctgtcttgggtggagttgcgggcaatctcgatcagctcgatgtactcatgcgggacgtacttgagcttgtgcctgagttcgcttttcttctcttccagctccctggcagcggcctcgctcttgctcttgaccagctgggatccccgcagtccgcagcgttgggcatgcttcaggcgggcgccggtgtccgcaaactttctcccacagatgtcgcaggcgaatggcttctcaccggtgtgcgtccggatgtggcgggtcaggtcgccggactgggagaagttcctcatgcagatccggcactgaaacggtttgggaatcggtgcccttgggtgcgtatggatctttgtgtgctcgcgcaggttgtcggagcgggcgaacttgcggccgcaaatgtcgcacgcaaacggcttttcgccagtgtgggtgcggatatggcgggtcagggagccggactgtgagaagttgcgcatacagatgcggcattggaaaggcttttccccggtgtgtatcttggtgtgcttggacaggtcgtcggagcgggcaaactttctcatgcaaatcctacactggaatggcctctccgccatagcagcgggtaccccgtggatgcccaccttcctgtacctggacctcctggcggactccctgttggactccttcctcttcctcggggccatggtgtcgtgtacctgcagaagtaacaccaaacaacagggtgagcatcgacaaaagaaacagtaccaagcaaataaatagcgtatgaaggcagggctaaaaaaatccacatatagctgctgcatatgccatcatccaagtatatcaagatcgaaataattataaaacatacttgtttattataatagataggtactcaaggttagagcatatgaatagatgctgcatatgccatcatgtatatgcatcagtaaaacccacatcaacatgtatacctatcctagatcgatatttccatccatcttaaactcgtaactatgaagatgtatgacacacacatacagttccaaaattaataaatacaccaggtagtttgaaacagtattctactccgatctagaacgaatgaacgaccgcccaaccacaccacatcatcacaaccaagcgaacaaaaagcatctctgtatatgcatcagtaaaacccgcatcaacatgtatacctatcctagatcgatatttccatccatcatcttcaattcgtaactatgaatatgtatggcacacacatacagatccaaaattaataaatccaccaggtagtttgaaacagaattctactccgatctagaacgaccgcccaaccagaccacatcatcacaaccaagacaaaaaaaagcatgaaaagatgacccgacaaacaagtgcacggcatatattgaaataaaggaaaagggcaaaccaaaccctatgcaacgaaacaaaaaaaatcatgaaatcgatcccgtctgcggaacggctagagccatcccaggattccccaaagagaaacactggcaagttagcaatcagaacgtgtctgacgtacaggtcgcatccgtgtacgaacgctagcagcacggatctaacacaaacacggatctaacacaaacatgaacagaagtagaactaccgggccctaaccatgcatggaccggaacgccgatctagagaaggtagagagggggggggggggggaggacgagcggcgtaccttgaagcggaggtgccgacgggtggatttgggggagatctggttgtgtgtgtgtgcgctccgaacaacacgaggttggggaaagagggtgtggagggggtgtctatttattacggcgggcgaggaagggaaagcgaaggagcggtgggaaaggaatcccccgtagctgccggtgccgtgagaggaggaggaggccgcctgccgtgccggctcacgtctgccgctccgccacgcaatttctggatgccgacagcggagcaagtccaacggtggagcggaactctcgagaggggtccagaggcagcgacagagatgccgtgccgtctgcttcgcttggcccgacgcgacgctgctggttcgctggttggtgtccgttagactcgtcgacggcgtttaacaggctggcattatctactcgaaacaagaaaaatgtttccttagtttttttaatttcttaaagggtatttgtttaatttttagtcactttattttattctattttatatctaaactattaaataaaaaaactaaaatagagttttagttttcttaatttagaggctaaaatagaataaaatagatgtactaaaaaaattagtctataaaaaccattaaccctaaaccctaaatggatgtactaataaaatggatgaagtattatataggtgaagctatttgcaaaaaaaaaggagaacacatgcacactaaaaagataaaactgtagagtcctgttgtcaaaatactcaattgtcctttagaccatgtctaactgttcatttatatgattctctaaaacactgatattattgtagtactatagattatattattcgtagagtaaagtttaaatatatgtataaagatagataaactgcacttcaaacaagtgtgacaaaaaaaatatgtggtaattttttataacttagacatgcaatgctcattatctctagagaggggcacgaccgggtcacgctgcactcacctttgtcatgcggccgctccggataaattcatccgactcaggttattgtttggcggccgcaagctgtactgaagcttgccgagtgccatccttggacactcgataaagtatattttattttttttattttgccaaccaaactttttgtggtatgttcctacactatgtagatctacatgtaccattttggcacaattacaaaaatgttttctataactattagatttagttcgtttatttgaatttcttcggaaaattcacatatgaactgcaagtcactcgaaacatgaaaaaccgtgcatgcaaaataaatgatatgcatgttatctagcacaagttacgaccgatttcagaagcagaccagaatcttcaagcaccatgctcactaaacatgaccgtgaacttgttatccagttgtttaaaaattgtataaaacacaaataaagtcagaaattaatgaaacttgtccacatgtcatgatatcatatatagaggttgtgataaaaatttgatattgtttcggtaaagttgtgacgtactatgtgtagaaacctaagtgacctacacataaaatcatagagtttcaatgtagttcactcgacaaagactttgtcaagtgtccgataaaaagtattcagcaaagaagccgttgtcgatttactgttcgtcgagatctctttgccgagtgtcacactaggcaaagtctttacggagtgtttttcaggctttgacactcggcaaagcgctcgattccagtagtgacagtaatttgcatcaaaaatagccgagagatttaaaatgagtcaactaatagaccaactaattattagctattagtcgttagcttctttaatctaagctaaaaccaactaatagcttatttgttgaattacaattagctcaacggaattctctgttttttctataaaaaagggaaactgcccctcatttacagcaaactgtccgctgcctgtcgtccagatacaatgaacgtacctagtaggaactcttttacacgctcggtcgctcgccgcggatcggagtcccaggaacacgacaccactgtggaacacgacaaagtctgctcagaggcggccacaccctggcgtgcaccgagccggagcccggataagcacggtaaggagagtacggcgggacgtggcgacccgtgtgtctgctgccacgcagccttcctccacgtagccgcgcggccgcgccacgtaccagggcccggcgctggtataaatgcgcgccacctccgctttagttctgcatacagccaacccaacacacacccgagcatatcacagtgacactacaccacaggtacctcttcctggagcaccagtgtccatggacgagagagcgagcgcgatggggaggagggcgtgttgcgcgaaggaaggcgttaagagaggggcgtggacgagcaaggaggacgatgccttggccgcctacgtcaaggcccatggcgaaggcaaatggagggaagtgccccagaaagccggtttgcgtcggtgcggcaagagctgccggctgcggtggctgaactacctccggcccaacatcaggcgcggcaacatctcctacgacgaggaggatctcatcatccgcctccacaggctcctcggcaacaggtggtcgctgattgcaggcaggctgcctggccgaacagacaatgaaatcaagaactactggaacagcacgctgggccggagggcaggcgccggcgccggcgccggcggcagctgggtcgtcgtcgcgccggacaccggctcgcacgccaccccggccgcgacgtcgggcgcctgcgagacgggccagaatagcgccgctcatcgcgcggaccccgactcagccgggacgacgacgacctcggcggcggcggtgtgggcgcccaaggccgtgcggtgcacgggcggactcttcttcttccaccgggacacgacgccggcgcacgcgggcgagacggcgacgccaatggccggtggaggtggaggaggaggaggagaagcagggtcgtcggacgactgcagctcggcggcgtcggtatcgcttcgcgtcggaagccacgacgagccgtgcttctccggcgacggtgacggcgactggatggacgacgtgagggccctggcgtcgtttctcgagtccgacgaggactggctccgctgtcagacggccgggcagcttgcgtaataatgagtagttagcttaatcacctagatcgttcaaacatttggcaataaagtttcttaagattgaatcctgttgccggtcttgcgatgattatcatataatttctgttgaattacgttaagcatgtaataattaacatgtaatgcatgacgttatttatgagatgggtttttatgattagagtcccgcaattatacatttaatacgcgatagaaaacaaaatatagcgcgcaaactaggataaattatcgcgcgcggtgtcatctatgttactagatcgtagttccctcattcactagctgcggccgctgcgaagtagtcaagggtcgcggccgcgtgaagtcgattccttctgaagcttgccgagtgccatccttggacactcgataaagtatattttattttttttattttgccaaccaaactttttgtggtatgttcctacactatgtagatctacatgtaccattttggcacaattacaaaaatgttttctataactattagatttagttcgtttatttgaatttcttcggaaaattcacatatgaactgcaagtcactcgaaacatgaaaaaccgtgcatgcaaaataaatgatatgcatgttatctagcacaagttacgaccgatttcagaagcagaccagaatcttcaagcaccatgctcactaaacatgaccgtgaacttgttatccagttgtttaaaaattgtataaaacacaaataaagtcagaaattaatgaaacttgtccacatgtcatgatatcatatatagaggttgtgataaaaatttgatattgtttcggtaaagttgtgacgtactatgtgtagaaacctaagtgacctacacataaaatcatagagtttcaatgtagttcactcgacaaagactttgtcaagtgtccgataaaaagtattcagcaaagaagccgttgtcgatttactgttcgtcgagatctctttgccgagtgtcacactaggcaaagtctttacggagtgtttttcaggctttgacactcggcaaagcgctcgattccagtagtgacagtaatttgcatcaaaaatagccgagagatttaaaatgagtcaactaatagaccaactaattattagctattagtcgttagcttctttaatctaagctaaaaccaactaatagcttatttgttgaattacaattagctcaacggaattctctgttttttctataaaaaagggaaactgcccctcatttacagcaaactgtccgctgcctgtcgtccagatacaatgaacgtacctagtaggaactcttttacacgctcggtcgctcgccgcggatcggagtcccaggaacacgacaccactgtggaacacgacaaagtctgctcagaggcggccacaccctggcgtgcaccgagccggagcccggataagcacggtaaggagagtacggcgggacgtggcgacccgtgtgtctgctgccacgcagccttcctccacgtagccgcgcggccgcgccacgtaccagggcccggcgctggtataaatgcgcgccacctccgctttagttctgcatacagccaacccaacacacacccgagcatatcacagtgacactacaccacaggtacctcttcctggagcaccagtgtccatgcgatgcccgatgcgatcaacggaagcggatggcccgtaaggatagcctgatttactctctattcagtccgtaggtttaatgagtctgttggattagcctacactttttctgtaaaatctattttagatagtagctaaatcagtaaatttggctagtatttttagctattctcttggagtttgctataagaccagaacatgtaaattggaagtttgtggacccggacgagaatgcatgacaaatccagagtattgatgatggaattcacctattttacccgactcttccattgtgtccatttctcatcatccccgggcgctttctgcatccggtacagctgacatgacacgttcacgcgttacatggctgatggctcacaagtcacccccacatgtctagtgttcgcccaggcagatcgtcctcggcctgcgctgccgtgctcttgccgccgcttgcttgggccctgctggcgcccgctgccgatcacacggcctacgcggtgcaggcagcgccaccgaacccgcagtcttgttgtgccgataggtggcagtggcagtggcactggcacggcacgcgatcgatcgctccgctcatctgctgacagtggatagagcagcgttggccgttggggccggatctccgtgaagcggtcgtccctgctgtactgtgccgctatggcgtgtcgctttcgccatgttttcttttcttttttttttctttttctttttgctagggcggtttctcgttcgctggtaacagggaccacttcggttgatccgttgaatttactgaaagagatgggaatggtcgctgtgcccgggacattgaatgagatgttgtgtaagtgaatatggctttagccttttgcgagtggggcggcaatgcacggcatgaactataatttccggtcaaacttttgtgtggaaatggatgctaaacgaacacaaaccgggtttaaaccagaggccgacacggcacacacggcgacattcaccgccggcttcctccgtcgccactcggcacaaggctcatcagtcgctagtctatattgagcggccgctatatgaatgcaatcgaacaatggttaaagcggccgcaaacaaaggcttacttgagtgcagcgtgacccggtcgtgcccctctctagagataatgagcattgcatgtctaagttataaaaaattaccacatattttttttgtcacacttgtttgaagtgcagtttatctatctttatacatatatttaaactttactctacgaataatataatctatagtactacaataatatcagtgttttagagaatcatataaatgaacagttagacatggtctaaaggacaattgagtattttgacaacaggactctacagttttatctttttagtgtgcatgtgttctcctttttttttgcaaatagcttcacctatataatacttcatccattttattagtacatccatttagggtttagggttaatggtttttatagactaatttttttagtacatctattttattctattttagcctctaaattaagaaaactaaaactctattttagtttttttatttaatagtttagatataaaatagaataaaataaagtgactaaaaattaaacaaataccctttaagaaattaaaaaaactaaggaaacatttttcttgtttcgagtagataatgccagcctgttaaacgccgtcgacgagtctaacggacaccaaccagcgaaccagcagcgtcgcgtcgggccaagcgaagcagacggcacggcatctctgtcgctgcctctggacccctctcgagagttccgctccaccgttggacttgctccgctgtcggcatccagaaattgcgtggcggagcggcagacgtgagccggcacggcaggcggcctcctcctcctctcacggcaccggcagctacgggggattcctttcccaccgctccttcgctttcccttcctcgcccgccgtaataaatagacaccccctccacaccctctttccccaacctcgtgttgttcggagcgcacacacacacaaccagatctcccccaaatccacccgtcggcacctccgcttcaaggtacgccgctcgtcctccccccccccccccctctctaccttctctagatcggcgttccggtccatgcatggttagggcccggtagttctacttctgttcatgtttgtgttagatccgtgtttgtgttagatccgtgctgctagcgttcgtacacggatgcgacctgtacgtcagacacgttctgattgctaacttgccagtgtttctctttggggaatcctgggatggctctagccgttccgcagacgggatcgatttcatgattttttttgtttcgttgcatagggtttggtttgcccttttcctttatttcaatatatgccgtgcacttgtttgtcgggtcatcttttcatgcttttttttgtcttggttgtgatgatgtggtctggttgggcggtcgttctagatcggagtagaattctgtttcaaactacctggtggatttattaattttggatctgtatgtgtgtgccatacatattcatagttacgaattgaagatgatggatggaaatatcgatctaggataggtatacatgttgatgcgggttttactgatgcatatacagagatgctttttgttcgcttggttgtgatgatgtggtgtggttgggcggtcgttcattcgttctagatcggagtagaatactgtttcaaactacctggtgtatttattaattttggaactgtatgtgtgtgtcatacatcttcatagttacgagtttaagatggatggaaatatcgatctaggataggtatacatgttgatgtgggttttactgatgcatatacatgatggcatatgcagcatctattcatatgctctaaccttgagtacctatctattataataaacaagtatgttttataattatttcgatcttgatatacttggatgatggcatatgcagcagctatatgtggatttttttagccctgccttcatacgctatttatttgcttggtactgtttcttttgtcgatgctcaccctgttgtttggtgttacttctgcaggtacacgacaccatggctcatgctgccctcagccctctctcccaacgctttgagagaatagctgtccagccactcactggtgtccttggtgctgagatcactggagtggacttgagggaaccacttgatgacagcacctggaatgagatattggatgccttccacacttaccaagtcatctactttcctggccaagcaatcaccaatgagcagcacattgcattctcaagaaggtttggaccagttgatccagtgcctcttctcaagagcattgaaggctatccagaggttcagatgatccgcagagaagccaatgagtctggaagggtgattggtgatgactggcacacagactccactttccttgatgcacctccagctgctgttgtgatgagggccatagatgttcctgagcatggcggagacactgggttcctttcaatgtacacagcttgggagacgttgtctccaaccatgcaagccaccatcgaagggctcaacgttgtgcactctgccacacgtgtgttcggttccctctaccaagcacagaaccgtcgcttcagcaacacctcagtcaaggtgatggatgttgatgctggtgacagagagacagtccatcccttggttgtgactcatcctggctctggaaggaaaggcctttatgtgaatcaagtctactgtcagagaattgagggcatgacagatgcagaatcaaagccattgcttcagttcctctatgagcatgccaccagatttgacttcacttgccgtgtgaggtggaagaaagaccaagtccttgtctgggacaacttgtgcaccatgcaccgtgctgttcctgactatgctggcaagttcagatacttgactcgcaccacagttggtggagttaggcctgcccgctaataagtagttagcttaatcacctagggtcgcagcgtgtgcgtgtccgtcgtacgttctggccggccgggccttgggcgcgcgatcagaagcgttgcgttggcgtgtgtgtgcttctggtttgctttaattttaccaagtttgtttcaaggtggatcgcgtggtcaaggcccgtgtgctttaaagacccaccggcactggcagtgagtgttgctgcttgtgtaggctttggtacgtatgggctttatttgcttctggatgttgtgtactacttgggtttgttgaattattatgagcagttgcgtattgtaattcagctgggctacctggacattgttatgtattaataaatgctttgctttcttctaaagatctttaagtgcttagtagaagagggcacttaagcggccgcaattaggagcgtgtgcagactggaacgcccatgcggccgcctaactgacttctttagaattggcacaggaacactggccactgcccttgatgtgcaattatgcctgcgaaagcctaggcaacacacgcgaataaacgagcgaatgacacggaaagctgatgtggtatgaattatacaacattatgggccaaaatattattctatccaccattgtgtagccacagcatcggtatttgagttgtgcgaggacaaatccctcgtgaggtcaaaaacagcaaataataaacccatctcctgaagacaccaaaaaaaaggagcagctcctcgtgtcaatgaacaagcgtcacaagaaaagggagcacgtaaataacctcttcaattgcttcagcatgaaaagaacgggaagaaatgcaagtctacagaggaaagtgcagctgtttcggctgccatggcaagttcctacatgggcgaggaaaagctgaactggattccagtcttcgcgctgtcatgctcagcttgctttaggatgcggcaatagttcacctggatgaaaaagatacaagttagtcttgaagcagtcgagtggacatccaaagtatcaaaatcgaaagcttgtaaatggggaaggaaatatacctctacccggaaaagtttggtaggcaaaataatcccaacgccagcagagctccggaacgtttgccgaaattcagaagccgaaaagttcttgtactcaccctccgacagtttcgcaaggtttccagcagtaaggaatgcgtggccatggattccagcgtctctgaatatcttgaggggcagatcaaaagaaaggtcagcgaaggcagacacggccagatcacctcccaagtaatcccttccagggtcagccgagccactctccgagttattaaggacatgcctccgcgcctctgttgggccaactccccttaatctgaaacccagcagagatgacggtccgcccaagctgcacactggagaagaattacctccaagataaaacctctctggcactgatgaagtcgaattcatgcgatgcccgatgcgatcaacggaagcggatggcccgccgacgagacacctcaaggacccatttaaatcgttattagtaaggcgcgtgatggcgctctcagcttccccggctcaggaagaactgctgcagcctgctgggaggccgttgaggaagcagcttgctgcagccgcgaggagcatcaactggagctatgccctcttctggtccatttcaagcactcaacgacctcgggtgctgacgtggacggacgggttctacaatggcgaggtgaagacgcgtaagatctcccactccgtggagctgacagccgaccagctgctcatgcagaggagcgagcagctccgggagctctacgaggccctccggtccggcgagtgcgaccgccgcgcggcgcggccggtgggctcgctgtcgccggaggacctcggggacaccgagtggtactacgtgatctgcatgacctacgccttcctgccgggccaaggcttgcccggcaggagttccgcgagcaacgagcatgtctggctgtgcaacgcgcacctcgccggcagcaaggacttcccccgcgcgctcctggccaagagcgcgtccattcagacaatcgtctgcatcccgctcatgggtggcgtgcttgagcttggtactactgataaggtgccggaggacccggacttggtcagccgagcaaccgtagcattctgggagccgcaatgtccgacatactcgaaagagccgagctccaacccgtcagcatacgaaaccggggaagccgcatacatagtcgtgttggaggacctcgatcacaatgccatggacatggagacggtgactgccgccgccgggagacacggaaccggacaggagctaggagaagtcgagagcccgtcaaatgcaagcctggagcacatcaccaaggggatcgacgagttctacagcctctgcgaggaaatggacgtgcagccgctagaggatgcctggataatggacgggtctaatttcgaagtcccgtcgtcagcgctcccggtggatggctcaagcgcacccgctgatggttctcgcgcgacaagtttcgtggtttggacgaggtcatcgcactcctgctcgggtgaagcggcggcggtgccggtcatcgaggagccgcagaaattgctgaagaaagcgttggccggcggcggtgcttgggcgaacacgaactgcggtggcgggggcacgacggtaacagcccaggaaaacggcgccaagaaccacgtcatgtcagagcgaaagcgccgggagaagctcaacgagatgttcctcgttctcaagtcgttggttccctccattcacaaggtggacaaagcatccatcctcgccgaaacgatagcctatctaaaggagcttcaacgaagggtacaagaactggaatccaggaggcaaggtggcagtgggtgtgtcagcaagaaagtctgtgtgggctccaactccaagaggaagagtccagagttcgccggtggcgcgaaggagcacccctgggtcctccccatggacggcaccagcaacgtcaccgtcaccgtctcggacacgaacgtgctcctggaggtgcaatgccggtgggagaagctcctgatgacacgggtgttcgacgccatcaagagcctccatttggacgctctctcggttcaggcttcggcaccagatggcttcatgaggctcaagataggagctcagtttgcaggctccggcgccgtcgtgcccggaatgatcagccaatctcttcgtaaagctatagggaagcgataataatgagtagttagcttaatcacctagatcgttcaaacatttggcaataaagtttcttaagattgaatcctgttgccggtcttgcgatgattatcatataatttctgttgaattacgttaagcatgtaataattaacatgtaatgcatgacgttatttatgagatgggtttttatgattagagtcccgcaattatacatttaatacgcgatagaaaacaaaatatagcgcgcaaactaggataaattatcgcgcgcggtgtcatctatgttactagatcgtaggtagttaatattgcggccgcttatattccatttaatcattaccctgttatccctagcggccgcttaggccgcttacacatagacacacacatcatctcattgatgcttggtaataattgtcattagattgtttttatgcatagatgcactcgaaatcagccaattttagacaagtatcaaacggatgtgacttcagtacattaaaaacgtccgcaatgtgttattaagttgtctaagcgtcaatttg

SEQ ID NO: 192 - DNA, 8914 bp, synthetic construct
  misc_feature 1..8914: note = PHP91539
  source 1..8914: mol_type = other DNA
aacactgcggccgcacttgaccgcggatggagccggagctgtggtgaggccatcgacgggaggtgggggagaacacagtctcagtgttctttgtgagtccgcaaggtttttagcttttctgtattaattaaggttgctgttggctgtagaatacggtcgtggaagagctgtatcggtagctactacgtaagctattatatactggaagtctggagctcgtcgatctccggtcgtcttcctccatttctcctcgtcttgctttgactgctgctaccatttgcttctgttttctgatgaagcatgccatgtcggccaccagtgtttgtgtggtttttgcagggaatggctttcaagtgctgtgattgaatggccctcgtcgtcctcggctgagctcacatggacgcgtcatgtgagtgagatatatgatcatatgatgagtggggttcgggtgagtgcgtacttgaagtaggatcccgctttcactcattcattcattggcctttaaaccgggaaattttcgcgaggagatggagggaagcaagcagggtgacgagtgcagagtgccgcgagcgctttgtcaaaaggcaccgccgtaggcaaaaaaatcaatggccctgactgactcgatggtagtactactgtagagactagagagggttgctccccatatcttcgtgtgacttttactccagcattgcatttccgtcattgagacgttaattaatagcagctttcgggacagatgactgtggccatgtttcgtcacggccgcttcgtgccagctgggggtactatagtactgtgattttgttagtaaaaactttcattaggccaccattgacgaccgggccttcgcttttgctgcgctaattaaccatttcccggcgaccgaagggaacatgaacatgccccgacacatgagggcatgaggactagtgttctccctgtcgttcgttgacttgactagtgatagtttaaacgctcttcaactggaagagcggttactaccggttcactagctagctgctaatcgagctagttaccctatgaggtgacatgaagcgctcacggttactatgacggttagcttcacgactgttggtggcagtagcgtacgacttagctatagttccggacttacccttaagataacttcgtatagcatacattatacgaagttatgggcccacgcgtgaagagcggttaccagagctggtcacctttgtccaccaagatggaactgtcttcggccagaatggccatctggattcagcaggcctagaaggccatttatcgctatcaactttgtatagaaaagttgggccgagctcggtacggccagaatggcccggaccgggttaccaagcggccgcatcgagcagctggcttgtggggaccagacaaaaaaggaatggtgcagaattgttaggcgcacctaccaaaagcatctttgcctttattgcaaagataaagcagattcctctagtacaagtggggaacaaaataacgtggaaaagagctgtcctgacagcccactcactaatgcgtatgacgaacgcagtgacgaccacaaaactcgagcaacgagatcatgagccaatcaaagaggagtgatgtagacctaaagcaataatggagccatgacgtaagggcttacgcccatacgaaataattaaaggctgatgtgacctgtcggtctctcagaacctttactttttatgtttggcgtgtatttttaaatttccacggcaatgacgatgtgaccgtcgacccactaaaacattgctttgtcaaaagctaaaaaagatgatgcccgacagccacttgtgtgaagcatgagaagccggtccctccactaagaaaattagtgaagcatcttccagtggtccctccactcacagctcaatcagtgagcaacaggacgaaggaaatgacgtaagccatgacgtctaatcccagggcccggtgaccaatcgaattcttaccctagctccctgcggctgttacgcggtcccccatcaatcttctgttcttgcggttgtagcctgtgtaacagtgctagagtatgtatgataaataggttttaagtctgcttacatgacattttttattgtggaagagacatataaaaattagagagagtggttctcatgcaacggcggacggcccggtgctaaaagagcttcaagacaaaataatgaaacaggaagagagtagatttatctaagagccaactttattatatgaatgtgtttattgttggctttagatgatatggtaaggagttagagctaataatagataggctctattattattattattaattaaactcgctctaaggaggaaagtgggaggaagggacgaggacgaagactactggaagcatcgtgcatggatgatggatgtggtgtctcttaatgtaggtggccggaggatgtacgtgttaattgcgcgataagcactcagatccaaccgcaaactacctccacactgacacactgatagagagaaagagagacctccgacgactgccgccgcagatgagccacgtacgtatacgacgtctgccggccggctcaggctgccgccatcaccctgctcgaaagtcgcgttaggcggcgccagctacataggagtatctagtctagccagttagtatactactactgcgctgatgatgaattaactctgcatagatactgtacttgcctccctccaacacccaaccacctcctgctcggctcttaataacttggacacggatcgatgccatccaaggaagaacacgacgacgacgacggaacatccaccatgcaagcttgcatccatacgccgatacgcgtgcatccatccatccaccattatttccattttccaccgatcacacgtacacaggcctatttaaggagcgacatcccactgcaactctcctcaccactcatcaccagctagctctagcaaagcacttgccatctaccgaccgccgcattccaaacagcccgacgagctagcagagcggcaggcacctccctcctcaaggaacccatggcggccaatgcgggcggcggtggagcgggaggaggcagcggcagcggcagcgtggctgcgccggcggtgtgccgccccagcggctcgcggtggacgccgacgccggagcagatcaggatgctgaaggagctctactacggctgcggcatccggtcgcccagctcggagcagatccagcgcatcaccgccatgctgcggcagcacggcaagatcgagggcaagaacgtcttctactggttccagaaccacaaggcccgcgagcgccagaagcgccgcctcaccagcctcgacgtcaacgtgcccgccgccggcgcggccgacgccaccaccagccaactcggcgtcctctcgctgtcgtcgccgccgccttcaggcgcggcgcctccctcgcccaccctcggcttctacgccgccggcaatggcggcggatcggctgtgctgctggacacgagttccgactggggcagcagcggcgctgctatggccaccgagacatgcttcctgcaggactacatgggcgtgacggacacgggcagctcgtcgcagtggccacgcttctcgtcgtcggacacgataatggcggcggccgcggcgcgggcggcgacgacgcgggcgcccgagacgctccctctcttcccgacctgcggcgacgacggcggcagcggtagcagcagctacttgccgttctggggtgccgcgtccacaactgccggcgccacttcttccgttgcgatccaacagcaacaccagctgcaggagcagtacagcttttacagcaacagcaacagcacccagctggccggcaccggcaaccaagacgtatcggcaacagcagcagcagccgccgccctggagctgagcctcagctcatggtgctccccttaccctgctgcagggagtatgtgagagcaacgcgagctgccactgctcttcactgatgtctctggaatggaaggaggaggaagtgagaacagatcattcgacaaagcagcattagtccgttgatcggtggaagaccactcgtcagtgttgagttgaatgtttgatcaataaaatacggcaatgctgtaagggttgttttttatgccattgataatacactgtactgttcagttgttgaactctatttcttagccatgccaagtgcttttcttattttgaataacattacagcaaaaagttgaaagacaaaaaaaaaaacccccgaacagagtgctttgggtcccaagcttctttagactgtgttcggcgttccccctaaatttctccccctatatctcactcacttgtcacatcagcgttctctttccccctatatctccacgctctacagcagttccacctatatcaaacctctataccccaccacaacaatattatatactttcatcttcaactaactcatgtaccttccaatttttttctactaataattatttacgtgcacagaaacttagcaaggagagagagagcggggtcacccggtccgggcctagaaggccagcttcaagtttgtacaaaaaagcaggctccggccagaatggcccggaccgggttaccgaattcgagctcggtaccctgggatccgatatcgatgggccctggccgaagcttggtcacccggtccgggcctagaaggccgatctcccgggcacccagctttcttgtacaaagtggccgttaacggatcggccagaatggcccggaccgggttaccgaattcctgcccttaaggccaattgttcaagattcattcaacaattgaaacatctcccatgattaaatcagtataaggttgctatggtcttgcttgacaaagtttttttttgagggaatttcaactaaatttttgagtgaaactatcaaatactgattttaaaaaatttttataaaaggaagcgcagagataaaaggccatctatgctacaaaagtacccaaaaatgtaatcctaaagtatgaattgcattttttttttgtttggacgaaaggaaaggagtattaccacaagaatgatatcatcttcatatttagatcttttttgggtaaagcttgagattctctaaatatagagaaatcagaagaaaaaaaaaccgtgttttggtggttttgatttctagcctccacaataactttgacggcgtcgacaagtctaacggacaccaagcagcgaaccaccagcgccgagccaagcgaagcagacggccgagacgttgacaccttcggcgcggcatctctcgagagttccgctccggcgctccacctccaccgctggcggtttcttattccgttccgttccgcctcctgctctgctcctctccacaccacacggcacgaaaccgttacggcaccggcagcacccagcacgggagaggggattcctttcccaccgttccttccctttccgccccgccgctataaatagccagccccatccccagcttttttccccaatctcatctcctctctcctgttgttcggagcacacgcacaatccgatcgatccccaaatccccttcgtctctcctcgcgagcctcgtggatcccagcttcaaggtacggcgatcgatcatcccccctccttctctctaccttcttttctctagactacatcggatggcgatccatggttagggcctgctagtttcccttcctgttttgtcgatggctgcgaggcacaatagatctgatggcgttatgacggctaacttgtcatgttgttgcgatttatagtccctttaggagatcagtttaatttctcggatggttcgagatcggtggtccatggttagtaccctaagatccgcgctgttagggttcgtagatggaggcgacctgttctgattgttaacttgtcagtacctgggaaatcctgggatggttctagctcgtccgcagatgagatcgatttcatgatcctctgtatcttgtttcgttgcctaggttccgtctaatctatccgtggtatgatgtagatgttttgatcgtgctaactacgtcttgtaaagttaattgtcaggtcataatttttagcatgcctttttttttgtttggttttgtctaattgggctgtcgttctagatcagagtagaagactgttccaaactacctgctggatttattgaacttggatctgtatgtgtgtcacatatcttcataaattcatgattaagatggattgaaatatcttttatctttttggtatggatagttctatatgttggtgtggctttgttagatgtatacatgcttagatacatgaagcaacgtgctgctactgtttagtaattgctgttcatttgtctaataaacagataaggatatgtatttatgttgctgttggttttgctggtactttgttggatacaaatgcttcaatacagaaaacagcatgctgctacgatttaccatttatctaatcttatcatatgtctaatctaataaacaaacatgcttttaaattatcttcatatgcttggatgatggcatacacagcggctatgtgtggttttttaaatacccagcatcatgggcatgcatgacactgctttaatatgctttttatttgcttgagactgtttcttttgtttatactgaccctttagttcggtgactcttctgcaggtcgactttaacttagcctaggatccatggcccagtccaagcacggcctgaccaaggagatgaccatgaagtaccgcatggagggctgcgtggacggccacaagttcgtgatcaccggcgagggcatcggctaccccttcaagggcaagcaggccatcaacctgtgcgtggtggagggcggccccttgcccttcgccgaggacatcttgtccgccgccttcatgtacggcaaccgcgtgttcaccgagtacccccaggacatcgtcgactacttcaagaactcctgccccgccggctacacctgggaccgctccttcctgttcgaggacggcgccgtgtgcatctgcaacgccgacatcaccgtgagcgtggaggagaactgcatgtaccacgagtccaagttctacggcgtgaacttccccgccgacggccccgtgatgaagaagatgaccgacaactgggagccctcctgcgagaagatcatccccgtgcccaagcagggcatcttgaagggcgacgtgagcatgtacctgctgctgaaggacggtggccgcttgcgctgccagttcgacaccgtgtacaaggccaagtccgtgccccgcaagatgcccgactggcacttcatccagcacaagctgacccgcgaggaccgcagcgacgccaagaaccagaagtggcacctgaccgagcacgccatcgcctccggctccgccttgccctccggactcagatctcgatagggtaccaatggccagttaacagatccagctgctgctgttctagggttcacaagtctgcctatttgtcttccccaatggagctatggttgtctggtctggtccttggtcgtgtcccgtttcattgtgtactatttacctgtaatgtgtatccttaagtctggtttgatggtgtctgaaacgttttgctgtggtagagcagcatggaagaactataatgaataagtgatccctaatcattgtgtccaaattttgcttctgctatacccttttgtgctgtttcttatgttttgcttaaaaatttgatctgacaaacaaatttgtctaaattatgctcttgttctgactgtgtactgtacacatttgtattgctaccggtttggcacatagttttctctttgattgcagatcaaacccttctgattgcagattgcttggctatggctgatgtgctcactgttcttctttagcttgtatattgctgatggtggcttggctacggctgaaaaagttgctgctgcgccgacttggcaactgttgctccagtaatgctttgtcctctcttcctagccgccgacttggcacttggcagctgttgctcctgtaatgcgttgttatctcttatctcttgagatgtactatgattttgaggctgtttgacttgtgccagattgccagtgctgatgctatattatctcaggtttttatgctagtatatgttttactgtgtgctgcctgtgtcgagttacgtaatctattgaaccgctatgcgtgttgatgccctgttgttgcttgccagattgatgcccctgttgcttgcagcttgcaagctgtagtgaaatcctaaaattcgaaaccaaatctattctgaacttttgaagatctgtgatgtccggaagaaaagattcaaacagataaacgggactctccagaatctataaaataaatgatcgacaaacgctttgctttggtaggcttcctagttagttagcggaccgaagcttcggtccgggcctagaaggccagcttcggccgccccgggcaactttattatacaaagttgatagataaatcagatatctggttcctaaggacccggcggaccgattaaactgattcggtccgacgcgttacctaataacttcgtatagcatacattatacgaagttattagctaactaactagtaagcttaagccatgggtcgacggatccgttacctgagctgattccgatgacttcgtaggttcctagctcaagccgctcgtgtccaagcgtcacttacgattagctaatgattacggcatctaggaccgactagctaactaactagtacgtacgcgccgactagctagctaaggtaccgagctcgaattcattccgattaatcgtggcctcttgctcttcaggatgaagagctatgtttaaacgtgcaagcgctactagacaattcagtacattaaaaacgtccgcaatgtgttattaagttgtctaagcgtcaattt

SEQ ID NO: 193 - DNA, 9976 bp, synthetic construct
  misc_feature 1..9976: note = RV025340
  source 1..9976: mol_type = other DNA
gtttacccgccaatatatcctgtcaaacactgcggccgcacttgaccgcggatggagccggagctgtggtgaggccatcgacgggaggtgggggagaacacagtctcagtgttctttgtgagtccgcaaggtttttagcttttctgtattaattaaggttgctgttggctgtagaatacggtcgtggaagagctgtatcggtagctactacgtaagctattatatactggaagtctggagctcgtcgatctccggtcgtcttcctccatttctcctcgtcttgctttgactgctgctaccatttgcttctgttttctgatgaagcatgccatgtcggccaccagtgtttgtgtggtttttgcagggaatggctttcaagtgctgtgattgaatggccctcgtcgtcctcggctgagctcacatggacgcgtcatgtgagtgagatatatgatcatatgatgagtggggttcgggtgagtgcgtacttgaagtaggatcccgctttcactcattcattcattggcctttaaaccgggaaattttcgcgaggagatggagggaagcaagcagggtgacgagtgcagagtgccgcgagcgctttgtcaaaaggcaccgccgtaggcaaaaaaatcaatggccctgactgactcgatggtagtactactgtagagactagagagggttgctccccatatcttcgtgtgacttttactccagcattgcatttccgtcattgagacgttaattaatagcagctttcgggacagatgactgtggccatgtttcgtcacggccgcttcgtgccagctgggggtactatagtactgtgattttgttagtaaaaactttcattaggccaccattgacgaccgggccttcgcttttgctgcgctaattaaccatttcccggcgaccgaagggaacatgaacatgccccgacacatgagggcatgaggactagtgttctccctgtcgttcgttgacttgactagtgatagtttaaacgctcttcaactggaagagcggttactaccggttcactagctagctgctaatcgagctagttaccctatgaggtgacatgaagcgctcacggttactatgacggttagcttcacgactgttggtggcagtagcgtacgacttagctatagttccggacttacccttaagataacttcgtatagcatacattatacgaagttatgggcccacgcgtgaagagcggttaccagagctggtcacctttgtccaccaagatggaactgtcttcggccagaatggccatctggattcagcaggcctagaaggccatttatcgctatcaactttgtatagaaaagttgggccgaattcgagctcggtacggccagaatggcccggaccgggttaccgaattcgagctcggtaccctgggatccgatatcgatgggccctggccgaagcttggtcacccggtccgggcctagaaggccagcttcaagtttgtacaaaaaagcaggctccggccagaatggcccggaccgggttaccgaattcgagctcggtaccctgggatccggtgcgggcctcttcgctattacgccagctggcgaaagggggatgtgctgcaaggcgattaagttgggtaacgccagggttttcccagtcacgacgttgtaaaacgacggccagtgccaagctcagatcagcttgcatgcctgcagtgcagcgtgacccggtcgtgcccctctctagagataatgagcattgcatgtctaagttataaaaaattaccacatattttttttgtcacacttgtttgaagtgcagtttatctatctttatacatatatttaaactttactctacgaataatataatctatagtactacaataatatcagtgttttagagaatcatataaatgaacagttagacatggtctaaaggacaattgagtattttgacaacaggactctacagttttatctttttagtgtgcatgtgttctcctttttttttgcaaatagcttcacctatataatacttcatccattttattagtacatccatttagggtttagggttaatggtttttatagactaatttttttagtacatctattttattctattttagcctctaaattaagaaaactaaaactctattttagtttttttatttaataatttagatataaaatagaataaaataaagtgactaaaaattaaacaaataccctttaagaaattaaaaaaactaaggaaacatttttcttgtttcgagtagataatgccagcctgttaaacgccgtcgacgagtctaacggacaccaaccagcgaaccagcagcgtcgcgtcgggccaagcgaagcagacggcacggcatctctgtcgctgcctctggacccctctcgagagttccgctccaccgttggacttgctccgctgtcggcatccagaaattgcgtggcggagcggcagacgtgagccggcacggcaggcggcctcctcctcctctcacggcaccggcagctacgggggattcctttcccaccgctccttcgctttcccttcctcgcccgccgtaataaatagacaccccctccacaccctctttccccaacctcgtgttgttcggagcgcacacacacacaaccagatctcccccaaatccacccgtcggcacctccgcttcaaggtacgccgctcgtcctcccccccccccctctctaccttctctagatcggcgttccggtccatgcatggttagggcccggtagttctacttctgttcatgtttgtgttagatccgtgtttgtgttagatccgtgctgctagcgttcgtacacggatgcgacctgtacgtcagacacgttctgattgctaacttgccagtgtttctctttggggaatcctgggatggctctagccgttccgcagacgggatcgatttcatgattttttttgtttcgttgcatagggtttggtttgcccttttcctttatttcaatatatgccgtgcacttgtttgtcgggtcatcttttcatgcttttttttgtcttggttgtgatgatgtggtctggttgggcggtcgttctagatcggagtagaattctgtttcaaactacctggtggatttattaattttggatctgtatgtgtgtgccatacatattcatagttacgaattgaagatgatggatggaaatatcgatctaggataggtatacatgttgatgcgggttttactgatgcatatacagagatgctttttgttcgcttggttgtgatgatgtggtgtggttgggcggtcgttcattcgttctagatcggagtagaatactgtttcaaactacctggtgtatttattaattttggaactgtatgtgtgtgtcatacatcttcatagttacgagtttaagatggatggaaatatcgatctaggataggtatacatgttgatgtgggttttactgatgcatatacatgatggcatatgcagcatctattcatatgctctaaccttgagtacctatctattataataaacaagtatgttttataattattttgatcttgatatacttggatgatggcatatgcagcagctatatgtggatttttttagccctgccttcatacgctatttatttgcttggtactgtttcttttgtcgatgctcaccctgttgtttggtgttacttctgcaggtcgactctagaggatccaccggtcgccaccatggccctgtccaacaagttcatcggcgacgacatgaagatgacctaccacatggacggctgcgtgaacggccactacttcaccgtgaagggcgagggcagcggcaagccctacgagggcacccagacctccaccttcaaggtgaccatggccaacggcggccccctggccttctccttcgacatcctgtccaccgtgttcatgtacggcaaccgctgcttcaccgcctaccccaccagcatgcccgactacttcaagcaggccttccccgacggcatgtcctacgagagaaccttcacctacgaggacggcggcgtggccaccgccagctgggagatcagcctgaagggcaactgcttcgagcacaagtccaccttccacggcgtgaacttccccgccgacggccccgtgatggccaagaagaccaccggctgggacccctccttcgagaagatgaccgtgtgcgacggcatcttgaagggcgacgtgaccgccttcctgatgctgcagggcggcggcaactacagatgccagttccacacctcctacaagaccaagaagcccgtgaccatgccccccaaccacgtggtggagcaccgcatcgccagaaccgacctggacaagggcggcaacagcgtgcagctgaccgagcacgccgtggcccacatcacctccgtggtgcccttctgaagcggccgcaacctagacttgtccatcttctggattggccaacttaattaatgtatgaaataaaaggatgcacacatagtgacatgctaatcactataatgtgggcatcaaagttgtgtgttatgtgtaattactagttatctgaataaaagagaaagagatcatccatatttcttatcctaaatgaatgtcacgtgtctttataattctttgatgaaccagatgcatttcattaaccaaatccatatacatataaatattaatcatatataattaatatcaattgggttagcaaaacaaatctagtctaggtgtgttttgcgaattcgtaatcatgtcatagctgtttcctgtgtgaaattgttatccgctcacaattccacacaacatacgagccggaagcataaagtgtaaagcctggggtgcctaatgagtgagctaactcacattaattgcgttgcgctcactgcccgctttccagtcgggaaacctgtcgtgccagctgcattaatgaatcggccaacgcgcggggagaggcggtttgcgtattgggcgctcttccgctgatccgatatcgatgggccctggccgaagcttggtcacccggtccgggcctagaaggccgatctcccgggcacccagctttcttgtacaaagtggccgttaacggatcggccagaatggcccggaccgggttaccaagcggccgcatcgagcagctggcttgtggggaccagacaaaaaaggaatggtgcagaattgttaggcgcacctaccaaaagcatctttgcctttattgcaaagataaagcagattcctctagtacaagtggggaacaaaataacgtggaaaagagctgtcctgacagcccactcactaatgcgtatgacgaacgcagtgacgaccacaaaactcgagcaacgagatcatgagccaatcaaagaggagtgatgtagacctaaagcaataatggagccatgacgtaagggcttacgcccatacgaaataattaaaggctgatgtgacctgtcggtctctcagaacctttactttttatgtttggcgtgtatttttaaatttccacggcaatgacgatgtgaccgtcgacccactaaaacattgctttgtcaaaagctaaaaaagatgatgcccgacagccacttgtgtgaagcatgagaagccggtccctccactaagaaaattagtgaagcatcttccagtggtccctccactcacagctcaatcagtgagcaacaggacgaaggaaatgacgtaagccatgacgtctaatcccagggcccggtgaccaatcgaattcttaccctagctccctgcggctgttacgcggtcccccatcaatcttctgttcttgcggttgtagcctgtgtaacagtgctagagtatgtatgataaataggttttaagtctgcttacatgacattttttattgtggaagagacatataaaaattagagagagtggttctcatgcaacggcggacggcccggtgctaaaagagcttcaagacaaaataatgaaacaggaagagagtagatttatctaagagccaactttattatatgaatgtgtttattgttggctttagatgatatggtaaggagttagagctaataatagataggctctattattattattattaattaaactcgctctaaggaggaaagtgggaggaagggacgaggacgaagactactggaagcatcgtgcatggatgatggatgtggtgtctcttaatgtaggtggccggaggatgtacgtgttaattgcgcgataagcactcagatccaaccgcaaactacctccacactgacacactgatagagagaaagagagacctccgacgactgccgccgcagatgagccacgtacgtatacgacgtctgccggccggctcaggctgccgccatcaccctgctcgaaagtcgcgttaggcggcgccagctacataggagtatctagtctagccagttagtatactactactgcgctgatgatgaattaactctgcatagatactgtacttgcctccctccaacacccaaccacctcctgctcggctcttaataacttggacacggatcgatgccatccaaggaagaacacgacgacgacgacggaacatccaccatgcaagcttgcatccatacgccgatacgcgtgcatccatccatccaccattatttccattttccaccgatcacacgtacacaggcctatttaaggagcgacatcccactgcaactctcctcaccactcatcaccagctagctctagcaaagcacttgccatctaccgaccgccgcattccaaacagcccgacgagctagcagagcggcaggcacctccctcctcaaggaacccggatccatggccactgtgaacaactggctcgctttctccctctccccgcaggagctgccgccctcccagacgacggactccacactcatctcggccgccaccgccgaccatgtctccggcgatgtctgcttcaacatcccccaagattggagcatgaggggatcagagctttcggcgctcgtcgcggagccgaagctggaggacttcctcggcggcatctccttctccgagcagcatcacaaggccaactgcaacatgatacccagcactagcagcacagtttgctacgcgagctcaggtgctagcaccggctaccatcaccagctgtaccaccagcccaccagctcagcgctccacttcgcggactccgtaatggtggcctcctcggccggtgtccacgacggcggtgccatgctcagcgcggccgccgctaacggtgtcgctggcgctgccagtgccaacggcggcggcatcgggctgtccatgattaagaactggctgcggagccaaccggcgcccatgcagccgagggtggcggcggctgagggcgcgcaggggctctctttgtccatgaacatggcggggacgacccaaggcgctgctggcatgccacttctcgctggagagcgcgcacgggcgcccgagagtgtatcgacgtcagcacagggtggagccgtcgtcgtcacggcgccgaaggaggatagcggtggcagcggtgttgccggcgctctagtagccgtgagcacggacacgggtggcagcggcggcgcgtcggctgacaacacggcaaggaagacggtggacacgttcgggcagcgcacgtcgatttaccgtggcgtgacaaggcatagatggactgggagatatgaggcacatctttgggataacagttgcagaagggaagggcaaactcgtaagggtcgtcaagtctatttaggtggctatgataaagaggagaaagctgctagggcttatgatcttgctgctctgaagtactggggtgccacaacaacaacaaattttccagtgagtaactacgaaaaggagctcgaggacatgaagcacatgacaaggcaggagtttgtagcgtctctgagaaggaagagcagtggtttctccagaggtgcatccatttacaggggagtgactaggcatcaccaacatggaagatggcaagcacggattggacgagttgcagggaacaaggatctttacttgggcaccttcagcacccaggaggaggcagcggaggcgtacgacatcgcggcgatcaagttccgcggcctcaacgccgtcaccaacttcgacatgagccgctacgacgtgaagagcatcctggacagcagcgccctccccatcggcagcgccgccaagcgcctcaaggaggccgaggccgcagcgtccgcgcagcaccaccacgccggcgtggtgagctacgacgtcggccgcatcgcctcgcagctcggcgacggcggagccctggcggcggcgtacggcgcgcactaccacggcgccgcctggccgaccatcgcgttccagccgggcgccgccagcacaggcctgtaccacccgtacgcgcagcagccaatgcgcggcggcgggtggtgcaagcaggagcaggaccacgcggtgatcgcggccgcgcacagcctgcaggacctccaccacctgaacctgggcgcggccggcgcgcacgactttttctcggcagggcagcaggccgccgccgctgcgatgcacggcctgggtagcatcgacagtgcgtcgctcgagcacagcaccggctccaactccgtcgtctacaacggcggggtcggcgacagcaacggcgccagcgccgtcggcggcagtggcggtggctacatgatgccgatgagcgctgccggagcaaccactacatcggcaatggtgagccacgagcaggtgcatgcacgggcctacgacgaagccaagcaggctgctcagatggggtacgagagctacctggtgaacgcggagaacaatggtggcggaaggatgtctgcatgggggactgtcgtgtctgcagccgcggcggcagcagcaagcagcaacgacaacatggccgccgacgtcggccatggcggcgcgcagctcttcagtgtctggaacgacacttaaggtaccttcgacaaagcagcattagtccgttgatcggtggaagaccactcgtcagtgttgagttgaatgtttgatcaataaaatacggcaatgctgtaagggttgttttttatgccattgataatacactgtactgttcagttgttgaactctatttcttagccatgccaagtgcttttcttattttgaataacattacagcaaaaagttgaaagacaaaaaaaaaaacccccgaacagagtgctttgggtcccaagcttctttagactgtgttcggcgttccccctaaatttctccccctatatctcactcacttgtcacatcagcgttctctttccccctatatctccacgctctacagcagttccacctatatcaaacctctataccccaccacaacaatattatatactttcatcttcaactaactcatgtaccttccaatttttttctactaataattatttacgtgcacagaaacttagcaaggagagagagagcggggtcacccggtccgggcctagaaggccagcttcggccgccccgggcaactttattatacaaagttgatagataaatcagatatctggttcctaaggacccggcggaccgattaaactgattcggtccgacgcgttacctaataacttcgtatagcatacattatacgaagttattagctaactaactagtaagcttaagccatgggtcgacggatccgttacctgagctgattccgatgacttcgtaggttcctagctcaagccgctcgtgtccaagcgtcacttacgattagctaatgattacggcatctaggaccgactagctaactaactagtacgtacgcgccgactagctagctaaggtaccgagctcgaattcattccgattaatcgtggcctcttgctcttcaggatgaagagctatgtttaaacgtgcaagcgctactagacaattcagtacattaaaaacgtccgcaatgtgttattaagttgtctaagcgtcaatttgtttacaccacaatatatcctgcca

SEQ ID NO: 194 - DNA, 12399 bp, synthetic construct
  misc_feature 1..12399: note = PHP91539
  source 1..12399: mol_type = other DNA
gtttacccgccaatatatcctgtcaaacactgcggccgcacttgaccgcggatggagccggagctgtggtgaggccatcgacgggaggtgggggagaacacagtctcagtgttctttgtgagtccgcaaggtttttagcttttctgtattaattaaggttgctgttggctgtagaatacggtcgtggaagagctgtatcggtagctactacgtaagctattatatactggaagtctggagctcgtcgatctccggtcgtcttcctccatttctcctcgtcttgctttgactgctgctaccatttgcttctgttttctgatgaagcatgccatgtcggccaccagtgtttgtgtggtttttgcagggaatggctttcaagtgctgtgattgaatggccctcgtcgtcctcggctgagctcacatggacgcgtcatgtgagtgagatatatgatcatatgatgagtggggttcgggtgagtgcgtacttgaagtaggatcccgctttcactcattcattcattggcctttaaaccgggaaattttcgcgaggagatggagggaagcaagcagggtgacgagtgcagagtgccgcgagcgctttgtcaaaaggcaccgccgtaggcaaaaaaatcaatggccctgactgactcgatggtagtactactgtagagactagagagggttgctccccatatcttcgtgtgacttttactccagcattgcatttccgtcattgagacgttaattaatagcagctttcgggacagatgactgtggccatgtttcgtcacggccgcttcgtgccagctgggggtactatagtactgtgattttgttagtaaaaactttcattaggccaccattgacgaccgggccttcgcttttgctgcgctaattaaccatttcccggcgaccgaagggaacatgaacatgccccgacacatgagggcatgaggactagtgttctccctgtcgttcgttgacttgactaaccggttcactagctagctgctaagcgactaattaactagctgtcccacggcctaactagcacttaatcccctagcctaacctaagagcgctaatctaggctagtggtcacttagggctttaagtgcagtcgacgggcccggtgatagtttggttaccaagcggccgcatcgagcagctggcttgtggggaccagacaaaaaaggaatggtgcagaattgttaggcgcacctaccaaaagcatctttgcctttattgcaaagataaagcagattcctctagtacaagtggggaacaaaataacgtggaaaagagctgtcctgacagcccactcactaatgcgtatgacgaacgcagtgacgaccacaaaactcgagcaacgagatcatgagccaatcaaagaggagtgatgtagacctaaagcaataatggagccatgacgtaagggcttacgcccatacgaaataattaaaggctgatgtgacctgtcggtctctcagaacctttactttttatgtttggcgtgtatttttaaatttccacggcaatgacgatgtgaccgtcgacccactaaaacattgctttgtcaaaagctaaaaaagatgatgcccgacagccacttgtgtgaagcatgagaagccggtccctccactaagaaaattagtgaagcatcttccagtggtccctccactcacagctcaatcagtgagcaacaggacgaaggaaatgacgtaagccatgacgtctaatcccagggcccggtgaccaatcgaattcttaccctagctccctgcggctgttacgcggtcccccatcaatcttctgttcttgcggttgtagcctgtgtaacagtgctagagtatgtatgataaataggttttaagtctgcttacatgacattttttattgtggaagagacatataaaaattagagagagtggttctcatgcaacggcggacggcccggtgctaaaagagcttcaagacaaaataatgaaacaggaagagagtagatttatctaagagccaactttattatatgaatgtgtttattgttggctttagatgatatggtaaggagttagagctaataatagataggctctattattattattattaattaaactcgctctaaggaggaaagtgggaggaagggacgaggacgaagactactggaagcatcgtgcatggatgatggatgtggtgtctcttaatgtaggtggccggaggatgtacgtgttaattgcgcgataagcactcagatccaaccgcaaactacctccacactgacacactgatagagagaaagagagacctccgacgactgccgccgcagatgagccacgtacgtatacgacgtctgccggccggctcaggctgccgccatcaccctgctcgaaagtcgcgttaggcggcgccagctacataggagtatctagtctagccagttagtatactactactgcgctgatgatgaattaactctgcatagatactgtacttgcctccctccaacacccaaccacctcctgctcggctcttaataacttggacacggatcgatgccatccaaggaagaacacgacgacgacgacggaacatccaccatgcaagcttgcatccatacgccgatacgcgtgcatccatccatccaccattatttccattttccaccgatcacacgtacacaggcctatttaaggagcgacatcccactgcaactctcctcaccactcatcaccagctagctctagcaaagcacttgccatctaccgaccgccgcattccaaacagcccgacgagctagcagagcggcaggcacctccctcctcaaggaacccatggcggccaatgcgggcggcggtggagcgggaggaggcagcggcagcggcagcgtggctgcgccggcggtgtgccgccccagcggctcgcggtggacgccgacgccggagcagatcaggatgctgaaggagctctactacggctgcggcatccggtcgcccagctcggagcagatccagcgcatcaccgccatgctgcggcagcacggcaagatcgagggcaagaacgtcttctactggttccagaaccacaaggcccgcgagcgccagaagcgccgcctcaccagcctcgacgtcaacgtgcccgccgccggcgcggccgacgccaccaccagccaactcggcgtcctctcgctgtcgtcgccgccgccttcaggcgcggcgcctccctcgcccaccctcggcttctacgccgccggcaatggcggcggatcggctgtgctgctggacacgagttccgactggggcagcagcggcgctgctatggccaccgagacatgcttcctgcaggactacatgggcgtgacggacacgggcagctcgtcgcagtggccacgcttctcgtcgtcggacacgataatggcggcggccgcggcgcgggcggcgacgacgcgggcgcccgagacgctccctctcttcccgacctgcggcgacgacggcggcagcggtagcagcagctacttgccgttctggggtgccgcgtccacaactgccggcgccacttcttccgttgcgatccaacagcaacaccagctgcaggagcagtacagcttttacagcaacagcaacagcacccagctggccggcaccggcaaccaagacgtatcggcaacagcagcagcagccgccgccctggagctgagcctcagctcatggtgctccccttaccctgctgcagggagtatgtgagagcaacgcgagctgccactgctcttcactgatgtctctggaatggaaggaggaggaagtgagaacagatcattcgacaaagcagcattagtccgttgatcggtggaagaccactcgtcagtgttgagttgaatgtttgatcaataaaatacggcaatgctgtaagggttgttttttatgccattgataatacactgtactgttcagttgttgaactctatttcttagccatgccaagtgcttttcttattttgaataacattacagcaaaaagttgaaagacaaaaaaaaaaacccccgaacagagtgctttgggtcccaagcttctttagactgtgttcggcgttccccctaaatttctccccctatatctcactcacttgtcacatcagcgttctctttccccctatatctccacgctctacagcagttccacctatatcaaacctctataccccaccacaacaatattatatactttcatcttcaactaactcatgtaccttccaatttttttctactaataattatttacgtgcacagaaacttagcaaggagagagagagcggggtcaccggtcaccccggggctcggcgttaggcttttagtccgctaggtggctagaccgaggttaggacgctagttcactaggggcctagtggtgttttaaggatatcttaccctagctccctgcggctgttacgcggtcccccatcaatcttctgttcttgcggttgtagcctgtgtaacagtgctagagtatgtatgataaataggttttaagtctgcttacatgacattttttattgtggaagagacatataaaaattagagagagtggttctcatgcaacggcggacggcccggtgctaaaagagcttcaagacaaaataatgaaacaggaagagagtagatttatctaagagccaactttattatatgaatgtgtttattgttggctttagatgatatggtaaggagttagagctaataatatataggctctattattattattattaattaaactcgctctaaggaggaaagtgggaggaagggacgaggacgaagactactggaagcatcgtccttggatgatggatgtggtgtctcttaatgtaggtggccggaggatgtacgtgttaattgcgcgataagcactcagatccaaccgcaaactacctccacactgacacactgatagagagaaagagagacctccgacgactgccgccgcagatgagccacgtacgtatacgacgtctgccggccggctcaggctgccgccatcaccctgctcgaaagtcgcgttaggcggcgccagctacataggagtatctagtctagccagttagtatactactactgcgctgatgatgaattaactctgcatatatactgtacatgcctccctccaacacccaaccacctcctgctcggctcttaataacttggacacggatcgatgccatccaaggaagaacacgacgacgacgacggaacatccaccatgcaagctagcatccatacgccgatacgcgtgcatccatccatccaccattatttccattttccaccgatcacacgtacacaggcctatttaaggagcgacatcccactgcaactctcctcaccactcatcaccagctagctctagcaaagcacttgccatctaccgaccgccgcattccaaacagcccgacgagctagcagagcggcagagatctccctcctcaaggaccatggccactgtgaacaactggctcgctttctccctctccccgcaggagctgccgccctcccagacgacggactccacactcatctcggccgccaccgccgaccatgtctccggcgatgtctgcttcaacatcccccaagattggagcatgaggggatcagagctttcggcgctcgtcgcggagccgaagctggaggacttcctcggcggcatctccttctccgagcagcatcacaaggccaactgcaacatgatacccagcactagcagcacagtttgctacgcgagctcaggtgctagcaccggctaccatcaccagctgtaccaccagcccaccagctcagcgctccacttcgcggactccgtaatggtggcttcctcggccggtgtccacgacggcggtgccatgctcagcgcggccgccgctaacggtgtcgctggcgctgccagtgccaacggcggcggcatcgggctgtccatgattaagaactggctgcggagccaaccggcgcccatgcagccgagggtggcggcggctgagggcgcgcaggggctctctttgtccatgaacatggcggggacgacccaaggcgctgctggcatgccacttctcgctggagagcgcgcacgggcgcccgagagtgtatcgacgtcagcacagggtggagccgtcgtcgtcacggcgccgaaggaggatagcggtggcagcggtgttgccggcgctctagtagccgtgagcacggacacgggtggcagcggcggcgcgtcggctgacaacacggcaaggaagacggtggacacgttcgggcagcgcacgtcgatttaccgtggcgtgacaaggcatagatggactgggagatatgaggcacatctttgggataacagttgcagaagggaagggcaaactcgtaagggtcgtcaagtctatttaggtggctatgataaagaggagaaagctgctagggcttatgatcttgctgctctgaagtactggggtgccacaacaacaacaaattttccagtgagtaactacgaaaaggagctcgaggacatgaagcacatgacaaggcaggagtttgtagcgtctctgagaaggaagagcagtggtttctccagaggtgcatccatttacaggggagtgactaggcatcaccaacatggaagatggcaagcacggattggacgagttgcagggaacaaggatctttacttgggcaccttcagcacccaggaggaggcagcggaggcgtacgacatcgcggcgatcaagttccgcggcctcaacgccgtcaccaacttcgacatgagccgctacgacgtgaagagcatcctggacagcagcgccctccccatcggcagcgccgccaagcgcctcaaggaggccgaggccgcagcgtccgcgcagcaccaccacgccggcgtggtgagctacgacgtcggccgcatcgcctcgcagctcggcgacggcggagccctggcggcggcgtacggcgcgcactaccacggcgccgcctggccgaccatcgcgttccagccgggcgccgccagcacaggcctgtaccacccgtacgcgcagcagccaatgcgcggcggcgggtggtgcaagcaggagcaggaccacgcggtgatcgcggccgcgcacagcctgcaggacctccaccacctgaacctgggcgcggccggcgcgcacgactttttctcggcagggcagcaggccgccgccgctgcgatgcacggcctgggtagcatcgacagtgcgtcgctcgagcacagcaccggctccaactccgtcgtctacaacggcggggtcggcgacagcaacggcgccagcgccgtcggcggcagtggcggtggctacatgatgccgatgagcgctgccggagcaaccactacatcggcaatggtgagccacgagcaggtgcatgcacgggcctacgacgaagccaagcaggctgctcagatggggtacgagagctacctggtgaacgcggagaacaatggtggcggaaggatgtctgcatgggggactgtcgtgtctgcagccgcggcggcagcagcaagcagcaacgacaacatggccgccgacgtcgggcatggcggcgcgcagctcttcagtgtctggaacgacacttaagcgtacctagtggtacctgacatcttatagtctgcaacctctcgtgtctgaattcctatctttatcaagtgttattgcttccacgactataggacagctttcgtcgaaagcttttgctcatgtgatctcgaaggattcatctagtctgatttttcgtgacttgtatcggttttattggattcatccaacatatatcaataaaaaatgagttgtgtttcctttcttcctagttcagttaaaattatttccctcctgcgcttgtgctgtaattgtctgtgtacctgttgtttgtgactgtgttagttcccttggatatgatttcgtatttgatatgtacatggagatagcttagcttcattattggagtatgaagttagtatgacatagtcactctcctggaaaattgacactgcaaaccatatttttattctgaaccacaaatcctagtcagtccgctggcatatgccgtccgtttgctgaatccagaacgtgggtttggagatgtacggctgagatgcctctatgcgaaggggatttcgtggtgaaacgagatgggagtagagcaacgcccgtggaagatgcttcaaacttccacacttttgagcaacgatcggcagtagtaaggtagacgatttcaagatcaaagcatatgaagataaacaacatcaacaacaaaatttgttggggttctatagagagaaacagagctacatacatacactgttttgtatctaccatctgagatgatgaaaagatgaaaaactaaagaatgccccggcgccaacgccaggacacgccgcgcgcgcgtcacccgagccatctcttgacccagccggcgctgtatatttacacacgttgcagcatcgatcaccacctgttcgatcgcgtcgccgtcaccaagcttggcgcgccggtcacccggtccgggcctagaaggccacccggggcgacttattgaactagtctagggcgcggctaacaacctagcttagattgccttgtctaaacccttaggctaacgcgccaccccacccagcaggcagcagcagtatccaacgaccgaagccgaggccggccacactgatagtttaaactgaaggcgggaaacgacaatctgatcatgagcggagaattaagggagtcacgttatgacccccgccgatgacgcgggacaagccgttttacgtttggaactgacagaaccgcaacgattgaaggagccactcagccgcgggtttctggagtttaatgagctaagcacatacgtcagaaaccattattgcgcgttcaaaagtcgcctaaggtcactatcagctagcaaatatttcttgtcaaaaatgctccactgacgttccataaattcccctcggtatccaattagagtctcatattcactctcccggcggatctcgactctagaggatcgctcaggaaggccgctgagatagagccatggggaggagggcgtgttgcgcgaaggaaggcgttaagagaggggcgtggacgagcaaggaggacgatgccttggccgcctacgtcaaggcccacggcgaaggcaaatggagggaagtgccccagaaagccggtttgcgtcggtgcggcaagagctgccggctgcggtggctgaactacctccggcccaacatcaggcgcggcaacatctcctacgacgaggaggatctcatcatccgcctccacaggctcctcggcaacaggtggtcgctgattgcaggcaggctgcctggccgaacagacaatgaaatcaagaactactggaacagcacgctgggccggagggcaggcgccggcgccggcgccggcggcagatccacgatggcgctttcagcttcccgagttcagcaggcggaagaactgctgcaacgacctgctgagaggcagctgatgaggagccagcttgctgcagccgccaggagcatcaactggagctacgccctcttctggtccatttcagacactcaaccaggggtgctgacgtggacggacgggttctacaacggcgaggtgaagacgcggaagatttccaactccgtggagctgacatccgaccagctcgtcatgcagaggagcgaccagctccgggagctctacgaggccctcctgtcgggcgagggcgaccgccgcgctgcgcctgcgcggccggccggctctctgtcgccggaggacctcggcgacaccgagtggtactacgtggtgtccatgacctacgccttccggccaggccaagggttgcccggcaggagtttcgcgagcgacgagcatgtctggctgtgcaacgcgcacctcgccggcagcaaagccttcccccgcgcgctcctcgccaagagcgcgtccattcagtcaatcctctgcatcccggttatgggcggcgtgcttgagcttggtacaactgacacggtgccggaggccccggacttggtcagccgagcaaccgcggctttctgggagccgcagtgcccgagctccagcccgtcaggacgagcaaacgagacgggcgaggccgcagcagacgacggcacgtttgcgttcgaggaactcgaccacaataatggcatggacgacatagaggcgatgaccgccgccgggggacacgggcaggaggaggagctaagactaagagaagccgaggccctgtcagacgacgcaagcctggagcacatcaccaaggagatcgaggagttctacagcctctgcgacgaaatggacctgcaggcgctaccactaccgctagaggacggctggaccgtggacgcgtccaatttcgaggtcccctgctcttccccgcagccagcgccgcctccggtggatagggctaccgctaacgtcgccgccgacgcctcaagggcacccgtctacggctctcgcgcgacgagtttcatggcttggacgaggtcctcgcagcagtcgtcgtgctccgacgacgcggcgcccgcagcagtagtgccggccatcgaggagccgcagagattgctgaagaaagtggtggccggcggcggtgcttgggagagctgtggcggcgcgacgggagcagcacaggaaatgagtggcactggcaccaagaaccacgtcatgtcggagcgaaagcgacgagagaagctcaacgagatgttcctcgtcctcaagtcactgcttccgtccattcacagggtgaacaaagcgtcgatcctcgccgaaacgatagcctacctcaaggagcttcagagaagggtgcaagagctggagtccagtagggaacctgcgtcgcgcccatccgaaacgacgacaaggctaataacaaggccctcccgtggcaataatgagagtgtgaggaaggaggtctgcgcgggctccaagaggaagagcccagagctcggcagagacgacgtggagcgccccccggtcctcacgatggacgccggcaccagcaacgtcaccgtcaccgtctcggacaaggatgtgctcctggaggtgcagtgccggtgggaggagctcctgatgacgcgagtgttcgacgccatcaagagcctccatttggacgtcctctcggttcaggcttcagcgccagatggcttcatggggcttaagatacgagctcagtttgctggctccggtgccgtcgtgccctggatgatcagcgaggctcttcgcaaagctatagggaacccctgggtcgtcgtcgcgccggacaccggctcgcacgccaccccggccgcgacgtcgggcgcctgcgagacgggccagaatagcgccgctcatcgcgcggaccccgactcagccgggacgacgacgacctcggcggcggcggtgtgggcgcccaaggccgtgcggtgcacgggcggactcttcttcttccaccgggacacgacgccggcgcacgcgggcgagacggcgacgccaatggccggtggaggtggaggaggaggaggagaagcagggtcgtcggacgactgcagctcggcggcgtcggtatcgcttcgcgtcggaagccacgacgagccgtgcttctccggcgacggtgacggcgactggatggacgacgtgagggccctggcgtcgtttctggagtccgacgaggactggctccgctgtcagacggccgggcagcttgcgtagtggccaggtaccactaactatctatactgtaataatgttgtatagccgccggatagctagctagtttagtcattcagcggcgatgggtaataataaagtgtcatccatccatcaccatgcgtggcaacgtgagcaatgacctgattgaacaaattgaaatgaaaagaagaaatatgttatatgtcaacgagatttcctcataatgccactgacgacgtgtgtccaagaaatgtatcagtgatacgtatattcacaatttttttatgacttatactcacaatttgtttttttactacttatactcacaatttgttgtgcgtaccataacaatttcgatcgaatatatatcagaaagttgacgaaagtaagctcactcaaaaagttaaatgggctgcggaagctgcgtcaggcccaagttttggctattctatccggtatccacgattttgatggctgagggacatatgttcgcttaagcttgcctctaacacgctaaccccttagagagttcctaacgccctagactagttcaataagtcggcctaactaaactgggttaacggcgcgaaacgtgcaagcgctactagacaattcagtacattaaaaacgtccgcaatgtgttattaagttgtctaagcgtcaatttgtttacaccacaatatatcctgcca

SEQ ID NO: 195 - DNA, 1522 bp, Agrobacterium tumefaciens
  source 1..1522: mol_type = unassigned DNA
ctaccggcgcggcagcgttacccgtgtcggcggctccaacggctcgccatcgtccagaaaacacggctcatcgggcatcggcaggcgctgctgcccgcgccgttcccattcctccgtttcggtcaaggctggcaggtctggttccatgcccggaatgccgggctggctgggcggctcctcgccggggccggtcggtagttgctgctcgcccggatacagggtcgggatgcggcgcaggtcgccatgccccaacagcgattcgtcctggtcgtcgtgatcaaccaccacggcggcactgaacaccgacaggcgcaactggtcgcggggctggccccacgccacgcggtcattgaccacgtaggccgacacggtgccggggccgttgagcttcacgacggagatccagcgctcggccaccaagtccttgactgcgtattggaccgtccgcaaagaacgtccgatgagcttggaaagtgtcttctggctgaccaccacggcgttctggtggcccatctgcgccacgaggtgatgcagcagcattgccgccgtgggtttcctcgcaataagcccggcccacgcctcatgcgctttgcgttccgtttgcacccagtgaccgggcttgttcttggcttgaatgccgatttctctggactgcgtggccatgcttatctccatgcggtaggggtgccgcacggttgcggcaccatgcgcaatcagctgcaacttttcggcagcgcgacaacaattatgcgttgcgtaaaagtggcagtcaattacagattttctttaacctacgcaatgagctattgcggggggtgccgcaatgagctgttgcgtaccccccttttttaagttgttgatttttaagtctttcgcatttcgccctatatctagttctttggtgcccaaagaagggcacccctgcggggttcccccacgccttcggcgcggctccccctccggcaaaaagtggcccctccggggcttgttgatcgactgcgcggccttcggccttgcccaaggtggcgctgcccccttggaacccccgcactcgccgccgtgaggctcggggggcaggcgggcgggcttcgcccttcgactgcccccactcgcataggcttgggtcgttccaggcgcgtcaaggccaagccgctgcgcggtcgctgcgcgagccttgacccgccttccacttggtgtccaaccggcaagcgaagcgcgcaggccgcaggccggaggcttttccccagagaaaattaaaaaaattgatggggcaaggccgcaggccgcgcagttggagccggtgggtatgtggtcgaaggctgggtagccggtgggcaatccctgtggtcaagctcgtgggcaggcgcagcctgtccatcagcttgtccagcagggttgtccacgggccgagcgaagcgagccagccggtggccgctcgcggccatcgtccacatatccacgggctggcaagggagcgcagcgaccgcgcagggcgaagcccggagagcaagcccgtaggggg

SEQ ID NO: 196 - DNA, 2400 bp, Agrobacterium tumefaciens
  source 1..2400: mol_type = unassigned DNA
cacctaaacgaaggccgggccactcacccggccttttttgtacgctcatagggcagaacaaaccaacgttttatctataccgctacagggtatttaattcctatttaatctgcgctagaatgaggcatgtttaaccgaatctgacgttttccctgcaaatgccaaaatactatgcctatctccgggtttcgcgtgacggccaagacccggaaaaccaaaaatacggtttgctcgaatacgcgaacgccaaaggcttcgcgccgctacagatcgaggaagaaattgccagcagagcaaaggactggcgcaagcgcaagctcggagcaatcatcgaaaaggccgagcgtggcgacgtgctactgacgccggagattacgcgcattgccggttccgccctcgccgccttggaaattctcaaagcggcgagcgagcgcggcctaatcgtccatgtgaccaaacagaagatcatcatggacggcagcctacaaagcgacatcatggcaaccgtgcttggcttggctgcacagatcgagcggcatttcattcaggcacgtaccaccgaggcgctacaagtcgccagagagcgcggcaagacgctcgggcgacccaagggcagcaaatcgagcgccttgaagctggacagccgtattgatgaagtacaggcatacgtgaaccttggcttgccgcaaagtcgcgcagccgagttgttaggcgtcagccctcacaccttgcgcctgttcatcaaacgccggaacatcaaacccacaaacactagaccaaccatcaccatgccggggagggaacaacatgcctaagaacaacaaagcccccggccatcgtatcaacgagatcatcaagacgagcctcgcgctcgaaatggaggatgcccgcgaagctggcttagtcggctacatggcccgttgccttgtgcaagcgaccatgccccacaccgaccccaagaccagctactttgagcgcaccaatggcatcgtcaccttgtcgatcatgggcaagccgagcatcggcctgccctacggttctatgccgcgcaccttgcttgcttggatatgcaccgaggccgtgcgaacgaaagaccccgtgttgaaccttggccggtcgcaatcggaatttctacaaaggctcggaatgcacaccgatggccgttacacggccacccttcgcaatcaggcgcaacgcctgttttcatccatgatttcgcttgccggcgagcaaggcaatgacttcggcattgagaacgtcgtcattgccaagcgcgcttttctattctggaatcccaagcggccagaagatcgggcgctatgggatagcaccctcaccctcacaggcgatttcttcgaggaagtcacccgctcaccggttcctatccgaatcgactacctgcatgccttgcggcagtctccgcttgcgatggacatttacacgtggctgacctatcgcgtgttcctgttgcgggccaagggccgccccttcgtgcaaatcccttgggtcgccctgcaagcgcaattcggctcatcctatggcagccgcgcacgcaactcgcccgaactggacgataaggcccgagagcgggcagagcgggcagcactcgccagcttcaaatacaacttcaaaaagcgcctacgcgaagtgttgattgtctatcccgaggcaagcgactgcatcgaagatgacggcgaatgcctgcgcatcaaatccacacgcctgcatgtcacccgcgcacccggcaagggcgctcgcatcggcccccctccgacttgaccaggccaacgctacgcttggcttggtcaagccttcccatccaacagcccgccgtcgagcgggcttttttatccccggaagcctgtggatagagggtagttatccacgtgaaaccgctaatgccccgcaaagccttgattcacggggctttccggcccgctccaaaaactatccacgtgaaatcgctaatcagggtacgtgaaatcgctaatcggagtacgtgaaatcgctaataaggtcacgtgaaatcgctaatcaaaaaggcacgtgagaacgctaatagccctttcagatcaacagcttgcaaacacccctcgctccggcaagtagttacagcaagtagtatgttcaattagcttttcaattatgaatatatatatcaattattggtcgcccttggcttgtggacaatgcgctacgcgcaccggctccgcccgtggacaaccgcaagcggttgcccaccgtcgagcgccagcgcctttgcccacaacccggcggccgcaacagatcgttttataaatttttttttttgaaaaagaaaaagcccgaaaggcggcaacctctcgggcttctggatttccgatcaacgcaggagtcgttcggaaagtagctgttccagaa

SEQ ID NO: 197 - DNA, 3207 bp, Agrobacterium tumefaciens
  source 1..3207: mol_type = unassigned DNA
cacctaaacgaaggccgggccactcacccggccttttttgtacgctcatagggcagaacaaaccaacgttttatctataccgctacagggtatttaattcctatttaatctgcgctagaatgaggcatgtttaaccgaatctgacgttttccctgcaaatgccaaaatactatgcctatctccgggtttcgcgtgacggccaagacccggaaaaccaaaaatacggtttgctcgaatacgcgaacgccaaaggcttcgcgccgctacagatcgaggaagaaattgccagcagagcaaaggactggcgcaagcgcaagctcggagcaatcatcgaaaaggccgagcgtggcgacgtgctactgacgccggagattacgcgcattgccggttccgccctcgccgccttggaaattctcaaagcggcgagcgagcgcggcctaatcgtccatgtgaccaaacagaagatcatcatggacggcagcctacaaagcgacatcatggcaaccgtgcttggcttggctgcacagatcgagcggcatttcattcaggcacgtaccaccgaggcgctacaagtcgccagagagcgcggcaagacgctcgggcgacccaagggcagcaaatcgagcgccttgaagctggacagccgtattgatgaagtacaggcatacgtgaaccttggcttgccgcaaagtcgcgcagccgagttgttaggcgtcagccctcacaccttgcgcctgttcatcaaacgccggaacatcaaacccacaaacactagaccaaccatcaccatgccggggagggaacaacatgcctaagaacaacaaagcccccggccatcgtatcaacgagatcatcaagacgagcctcgcgctcgaaatggaggatgcccgcgaagctggcttagtcggctacatggcccgttgccttgtgcaagcgaccatgccccacaccgaccccaagaccagctactttgagcgcaccaatggcatcgtcaccttgtcgatcatgggcaagccgagcatcggcctgccctacggttctatgccgcgcaccttgcttgcttggatatgcaccgaggccgtgcgaacgaaagaccccgtgttgaaccttggccggtcgcaatcggaatttctacaaaggctcggaatgcacaccgatggccgttacacggccacccttcgcaatcaggcgcaacgcctgttttcatccatgatttcgcttgccggcgagcaaggcaatgacttcggcattgagaacgtcgtcattgccaagcgcgcttttctattctggaatcccaagcggccagaagatcgggcgctatgggatagcaccctcaccctcacaggcgatttcttcgaggaagtcacccgctcaccggttcctatccgaatcgactacctgcatgccttgcggcagtctccgcttgcgatggacatttacacgtggctgacctatcgcgtgttcctgttgcgggccaagggccgccccttcgtgcaaatcccttgggtcgccctgcaagcgcaattcggctcatcctatggcagccgcgcacgcaactcgcccgaactggacgataaggcccgagagcgggcagagcgggcagcactcgccagcttcaaatacaacttcaaaaagcgcctacgcgaagtgttgattgtctatcccgaggcaagcgactgcatcgaagatgacggcgaatgcctgcgcatcaaatccacacgcctgcatgtcacccgcgcacccggcaagggcgctcgcatcggcccccctccgacttgaccaggccaacgctacgcttggcttggtcaagccttcccatccaacagcccgccgtcgagcgggcttttttatccccggaagcctgtggatagagggtagttatccacgtgaaaccgctaatgccccgcaaagccttgattcacggggctttccggcccgctccaaaaactatccacgtgaaatcgctaatcagggtacgtgaaatcgctaatcggagtacgtgaaatcgctaataaggtcacgtgaaatcgctaatcaaaaaggcacgtgagaacgctaatagccctttcagatcaacagcttgcaaacacccctcgctccggcaagtagttacagcaagtagtatgttcaattagcttttcaattatgaatatatatatcaattattggtcgcccttggcttgtggacaatgcgctacgcgcaccggctccgcccgtggacaaccgcaagcggttgcccaccgtcgagcgccagcgcctttgcccacaacccggcggccgcaacagatcgttttataaatttttttttttgaaaaagaaaaagcccgaaaggcggcaacctctcgggcttctggatttccgatcaacgcaggagtcgttcggaaagtagctgttccagaactagattgcgcgtcccccttggtcaaattgggtatacccatttgggcctagtctagccggcatggcgcattacagcaatacgcaatttaaatgcgcctagcgcattttcccgaccttaatgcgcctcgcgctgtagcctcacgcccacatatgtgctaatgtggttacgtgtattttatggaggttatccaatgagccgcctgacaatcgacatgacggaccagcagcaccagagcctgaaagccctggccgccttgcagggcaagaccattaagcaatacgccctcgaacgtctgttccccggtgacgctgatgccgatcaggcatggcaggaactgaaaaccatgctggggaaccgcatcaacgatgggcttgccggcaaggtgtccaccaagagcgtcggcgaaattcttgatgaagaactcagcggggatcgcgcttgacggcctacatcctcacggctgaggccgaagccgatctacgcggcatcatccgctacacgcgccgggagtggggcgcggcgcaggtgcgccgctatatcgctaagctggaacagggcatagccaggcttgccgccggcgaaggcccgtttaaggacatgagcgaactctttcccgcgctgcggatggcccgctgcgaacaccactacgttttttgcctgccgcgtgcgggcgaacccgcgttggtcgtggcgatcctgcatgagcgcatggacctcatgacgcgacttgccgacaggctcaagggctgatttcagccgctaaaaatcgcgccactcacaacgtcctgatggcgtactaagctggg

SEQ ID NO: 198 - DNA, 3085 bp, Agrobacterium tumefaciens
  source 1..3085: mol_type = unassigned DNA
accgcacccggagcgggcgcgaggccgccaaggcccgaggcgtgaagtttggcccccgccctaccctcaccccggcacagatcgcgcacgcccgcgagctgatcgaccaggaaggccgcaccgtgaaagaggcggctgcactgcttggcgtgcatcgctcgaccctgtaccgcgcacttgagcgcagcgaggaagtgacgcccaccgaggccaggcggcgcggtgccttccgtgaggacgcattgaccgaggccgacgccctggcggccgccgagaatgaacgccaagaggaacaagcatgaaaccgcaccaggacggccaggacgaaccgtttttcattaccgaagagatcgaggcggagatgatcgcggccgggtacgtgttcgagccgcccgcgcacgtctcaaccgtgcggctgcatgaaatcctggccggtttgtctgatgccaagctggcggcctggccggccagcttggccgctgaagaaaccgagcgccgccgtctaaaaaggtgatgtgtatttgagtaaaacagcttgcgtcatgcggtcgctgcgtatatgatgcgatgagtaaataaacaaatacgcaaggggaacgcatgaaggttatcgctgtacttaaccagaaaggcgggtcaggcaagacgaccatcgcaacccatctagcccgcgccctgcaactcgccggggccgatgttctgttagtcgattccgatccccagggcagtgcccgcgattgggcggccgtgcgggaagatcaaccgctaaccgttgtcggcatcgaccgcccgacgattgaccgcgacgtgaaggccatcggccggcgcgacttcgtagtgatcgacggagcgccccaggcggcggacttggctgtgtccgcgatcaaggcagccgacttcgtgctgattccggtgcagccaagcccttacgacatatgggccaccgccgacctggtggagctggttaagcagcgcattgaggtcacggatggaaggctacaagcggcctttgtcgtgtcgcgggcgatcaaaggcacgcgcatcggcggtgaggttgccgaggcgctggccgggtacgagctgcccattcttgagtcccgtatcacgcagcgcgtgagctacccaggcactgccgccgccggcacaaccgttcttgaatcagaacccgagggcgacgctgcccgcgaggtccaggcgctggccgctgaaattaaatcaaaactcatttgagttaatgaggtaaagagaaaatgagcaaaagcacaaacacgctaagtgccggccgtccgagcgcacgcagcagcaaggctgcaacgttggccagcctcgcagacacgccagccatgaagcgggtcaactttcagttgccggcggaggatcacaccaagctgaagatgtacgcggtacgccaaggcaagaccattaccgagctgctatctgaatacatcgcgcagctaccagagtaaatgagcaaatgaataaatgagtagatgaattttagcggctaaaggaggcggcatggaaaatcaagaacaaccaggcaccgacgccgtggaatgccccatgtgtggaggaacgggcggttggccaggcgtaagcggctgggttgcctgccggccctgcaatggcactggaacccccaagcccgaggaatcggcgtgagcggtcgcaaaccatccggcccggtacaaatcggcgcggcgctgggtgatgacctggtggagaagttgaaggcagcgcaggccgcccagcggcaacgcatcgaggcagaagcacgccccggtgaatcgtggcaagcagccgctgatcgaatccgcaaagaatcccggcaaccgccggcagccggtgcgccgtcgattaggaagccgcccaagggcgacgagcaaccagattttttcgttccgatgctctatgacgtgggcacccgcgatagtcgcagcatcatggacgtggccgttttccgtctgtcgaagcgtgaccgacgagctggcgaggtgatccgctacgagcttccagacgggcacgtagaggtttccgcagggccggcaggcatggccagtgtgtgggattacgacctggtactgatggcggtttcccatctaaccgaatccatgaaccgataccgggaagggaagggagacaagcccggccgcgtgttccgtccacacgttgcggacgtactcaagttctgccggcgagccgatggcggaaagcagaaagacgacctggtagaaacctgcattcggttaaacaccacgcacgttgccatgcagcgtacgaagaaggccaagaacggccgcctggtgacggtatccgagggtgaagccttgattagccgctacaagatcgtaaagagcgaaaccgggcggccggagtacatcgagatcgagctagctgattggatgtaccgcgagatcacagaaggcaagaacccggacgtgctgacggttcaccccgattactttttgatcgatcccggcatcggccgttttctctaccgcctggcacgccgcgccgcaggcaaggcagaagccagatggttgttcaagacgatctacgaacgcagtggcagcgccggagagttcaagaagttctgtttcaccgtgcgcaagctgatcgggtcaaatgacctgccggagtacgatttgaaggaggaggcggggcaggctggcccgatcctagtcatgcgctaccgcaacctgatcgagggcgaagcatccgccggttcctaatgtacggagcagatgctagggcaaattgccctagcaggggaaaaaggtcgaaaaggtctctttcctgtggatagcacgtacattgggaacccaaagccgtacattgggaaccggaacccgtacattgggaacccaaagccgtacattgggaaccggtcacacatgtaagtgactgatataaaagagaaaaaaggcgatttttccgcctaaaactctttaaaacttattaaaactcttaaaacccgcctggcctgtgcataactgtctggccagcgcacagccgaagagctgcaaaaagcgcctacccttcggtcgctgcgctccctacgccccgccgcttcgcgtcggcctat

SEQ ID NO: 199 - DNA, 3604 bp, Agrobacterium tumefaciens
  source 1..3604: mol_type = unassigned DNA
atggcgaagtctgtcctaaaagcagcgcctgtagttgtagggttgacggccttgatggagcgtcatgccgatgccctctcgagccaacttcaagcacatcatcttaaggttttcccgccgcattccgagaagggcattcgaacattcgggccatcggaggcgtccaagctgctcggcgttggcgagtcatatttacggcagaccgcgtctgagatgccagagttgaatgttagcatgagcccgggtggcaggcgaatgttctcaattgaagatatccatgcgattcggaagtatatggatcaggtcggccgcgggaaccggcgctacctgccacatcgtcgaggcggcgagcagcttcaggttatctctgtgatgaatttcaaaggtgggtcgggtaagaccaccaccgccgcgcatctggcgcagtacctcgctatgcgcggatatcgagtcttggccattgatctcgatcctcaagcgagcctttctgcactctttgggagccaaccggagacggacgttggcccgaacgaaacgctctacggcgctataaggtatgatgatgagcaggtggcaatcgaacgagtcgtccgagggacttacattcccgacctccacctgattcctggtaatcttgagctgatggagtttgaacacgatacgccacgcgcgctgatgaaccgcaaagagggcgacacgctcttttatggtcgcatcagccaagtaattgaagatatcgcggataactatgacgtcgtggtcatcgactgccctccccagcttgggtatctcacgctatccgcattgactgcggcgacgtccattcttgtcacggtccatccgcagatgctggatgtgatgtcgatgaaccagtttctggcaatgacatcgaaccttttgcgtgaaatcgagaatgctggcgccaagttcaagtttaattggatgcgctatctgataacccgtttcgaaccgagcgacggaccacagaaccaaatggtaggttatctgcggtcgatttttggcgaaaatgtcctcaattttccgatgcttaaaaccaccgcggtttcggacgctggcctgacaaaccagactctattcgaagtggagcgtggcctgttcacgcgctcgacctatgatcgagccttggaggcgatgaacgccgtcaacgacgagatcgaaacactgatcaaaaaagcatggggtaggcccacatgagccggaagcacatccttggcgtctcaactgacgcccctgagacgtcgcccgccgacaataggacggcaaagaaccgctccatgccgctcctcggcgtaacaaggaaggagcgcgatccggcaacgaagctcacagcgaacattggtaacgcactgcgagagcaaaacgatcgtcttagccgtgccgaagagatcgagcggcgtctcgctgaaggtcaggcagtgatagagttggatgcctcgtcaatagaaccgtctttcgtgcaggatcgtatgcgaggggacattgacgggctccttacttcgatccgggaacaaggacagcaagtcccaatccttgtgcgaccgcatccgagccagccgggccgatatcaggttgccttcggccaccgccggctacgcgccgtttcagaactcggacttccggtcagagcggtcgttcgcgaactgacggacgagcaagtggtcgtagcacagggtcaggaaaacaatgagcgcgaagatcttaccttcatcgaaaaggcgcgcttcgcacatcgcctgaacaggcagttttctcgagagattgtcatcgccgcgatgtcgatcgacaagagcaatttgtccaagatgcttctgctcgttgacgccctcccctctgaactgaccgatgctattggtgccgctcctggtgttggacggccgagttggcaacaacttgccgagctgattgagaaagtttcttcaccggccgacgtggctaaatatgctatgtcggaggaagttcaagcgctgccatcggcagaacgattcaaggcggtgatcgctagtctgaagcccagtcgggttgcgcgtggacttcccgaggtcatggccaccccagacggcaccagaattgcacaggtgacgcagagcaaggccaaactggaaatcacgattgacaggaaggcgacgcccgattttgcgaccttcgtgctcgatcatgtgccagcgctgtatcaagcgtaccacgctgagaaccaacggaaacggggagagtaaaccgcaaaagaaaagagccccctcaacgtcgccgtcgcggaagcccttctgtctctctagcgcgaacagaatcgcatttcctcgaatcctcgtcaagagtttttagcgccgttttggtgagctgatttcctttgcctgctgaaaggtgaaagatgatgcagacaggaagtgtaacgacgccattcgggcggcggccaatgacgcttgcgcttgtgcggcgccagacggcgctggccgatatcaaacaaggcaagacagcggacaagtggaaggtctttagagacgcgtccgcggctatggaactacttggaatccagtccaacagtcttgccgtccttgatgcgctattgagctttcacccggaaacggagttgcgtcaggaggcacagctgatcgtcttcccgtcgaatgctcagcttgcccttcgggcgcatgggatggctggcgcgactttgcgtaggcacatcgccatgctcgtggagtcaggcttgatcgtccggaaggatagcgccaacggaaagcgttacgctcgtaaggatggcgctggtcagatcgagcgcgcgtttggcttcgatttgtctccgcttctcgcgcggtcggaagagctagcgatgatggcacagcaggtgatggccgatcgagcagcattcaggatggccaaagaaagtctgacgatttgccgacgggacgttcggaagctaattacggcagctatggaagagggagcggagggcgactggcaagctgtcgaggaagtctatgtggaacttgtgggtagaattccacgcgccccgacgcttgctgatgtagagtcaattctcgaagagatgtggatgctccaggaagagataatcaaccggttggaaattagagacaattcagaaaataatagcaccaatgctgcccagagcgagcagcacatacagaattcaaaacccgaatccgttaatgaacttgaacctcgctctgaaaaggagcagggcgctaagccgagtgaaatagaccgggcaaggagcgagccgataaaagcgttccccctcgggatgatcctgaaagcatgcccgaccattggcaactatgggccgagcggtgcggttgctagctggcgtgacctcatgtcggctgcggtggtggttcggtctatgctgggggtcagcccgtcggcttaccaagacgcgtgtgaggcaatgggaccggagaatgcggcagcagcgatggcgtgcattttggagcgagcgaacttcatcaattcgcccgggggctatctccgagatctgacacggcggagcgagcttgggaagttttcacttggcccgatgataatggcgctcttgaaggctagcgggcaggggacgttgcggtttggctag

SEQ ID NO: 200 - DNA, 14902 bp, Agrobacterium tumefaciens
  source 1..14902: mol_type = unassigned DNA
ctttccgacgctcaccgggctggttgccctcgccgctgggctggcggccgtctatggccctgcaaacgcgccagaaacgccgtcgaagccgtgtgcgagacaccgcggccgccggcgttgtggatacctcgcggaaaacttggccctcactgacagatgaggggcggacgttgacacttgaggggccgactcacccggcgcggcgttgacagatgaggggcaggctcgatttcggccggcgacgtggagctggccagcctcgcaaatcggcgaaaacgcctgattttacgcgagtttcccacagatgatgtggacaagcctggggataagtgccctgcggtattgacacttgaggggcgcgactactgacagatgaggggcgcgatccttgacacttgaggggcagagtgctgacagatgaggggcgcacctattgacatttgaggggctgtccacaggcagaaaatccagcatttgcaagggtttccgcccgtttttcggccaccgctaacctgtcttttaacctgcttttaaaccaatatttataaaccttgtttttaaccagggctgcgccctgtgcgcgtgaccgcgcacgccgaaggggggtgcccccccttctcgaaccctcccggcccgctaacgcgggcctcccatccccccaggggctgcgcccctcggccgcgaacggcctcaccccaaaaatggcagcgctggcagtccttgccattgccgggatcggggcagtaacgggatgggcgatcagcccgagcgcgacgcccggaagcattgacgtgccgcaggtgctggcatcgacattcagcgaccaggtgccgggcagtgagggcggcggcctgggtggcggcctgcccttcacttcggccgtcggggcattcacggacttcatggcggggccggcaatttttaccttgggcattcttggcatagtggtcgcgggtgccgtgctcgtgttcaattcagcgggttcgtgcgatccgtctgcatgatggtgatagccgtcagcatgattttcgtgtcgtcgaacttggtgaagggcattctcggcggcgatcacgacgccggccctgcggagccttcgccgcgtgcgcgattcatggcggccgtggaggccaaggatttcgcgcgagtgcaagagctgatcgaggcgcgtggagccaagtcggcggctgattatgtccttgcgcagctcgccgtggccgaaggtctggaccgcaagcctggtgcgcgcgtcgtggtcgggaaagcggcgggcagcatggcaatgccgcctgcggcgctgggttttacgccaaggggagaagcggcatacgccatcgagcggtcagcctatggtgagccgaggtccagcattgcgaagcagtaccagcaggaatggaaccggaaggcggcgacctggtgggcgatggccggtgtggccggcatcatcggcgcgatcctggcggcggcggcaaccggctttgttgggctggcagtgtcgatccgcaaccgagtgaagcgcgtgcgcgacctgttggtgatggagccgggtgcagagccataagcggcaagagacgaaagcccggtttccgggcttttgttttgttacgccaaggacgagttttagcggctaaaggtgttgacgtgcgagaaatgtttagctaaacttctctcatgtgctggcggctgtcaccgctatgttcaaccaaggcgcggagcaaattatgggtgttatccatgaagaaacggcttaccgaaagccagttccaggaggcgatccaggggctggaagtggggcagcagaccatcgagatagcgcggggcgtcttagtcgatgggaagccacaggcgacgttcgcaacgtcgctgggactgaccaggggcgcagtgtcgcaagcggtgcatcgcgtgtgggccgcgttcgaggacaagaacttgcccgaggggtacgcgcgggtaacggcggttctgccggaacatcaggcgtacatcgtccggaagtgggaagcggacgccaagaaaaaacaggaaaccaaacgatgaaaactttggtcacggccaaccagaaaggcggcgtcggcaagacttcgacccttgtgcatcttgccttcgactttttcgagcgcggcttgcgggttgccgtgatcgacctggacccccagggcaatgcgtcctacacgctcaaggactttgctaccggcctgcatgcaagcaagctgttcggcgctgtccctgccggcggctggaccgaaaccgcacccgcagccggcgacggccaggccgcgcgcctcgccctcatcgagtccaacccggtactggcgaacgccgaacggctgtcgctggacgacgcccgcgagctgttcggggcgaacatcaaggccctggcgaaccaaggcttcgacgtgtgcctgatcgacacggccccgacccttggcgtcggcctggcggccgccctcttcgcggccgactatgtgctgtcccccatcgagcttgaggcgtacagcatccagggcatcaagaagatggtcacgaccattgcgaacgtgcgccagaagaacgccaagctgcaattccttggcatggtgcccagcaaggtcgatgcgcggaatccgcgccacgcgcgccaccaagccgagctgctggccgcgtaccccaagatgatgattccggccaccgttggcctgcgcagcagcatcgccgatgccctcgcatccggtgtgccggtctggaagatcaagaaaacggccgcgcgcaaggcatcgaaagaggttcgcgccctggctgattacgtgttcacgaagatggagatttcccaatgactgcggctcaagccaagaccaccaagaaaaacaccgctgcggccgctcaggaagccgcaggcgcggcgcagccgtccggcctggggttggatagcatcggcgacctgtcgagcctcctggacgctcctgcggcgtctcagggcggttccggccctatcgagctggacctggacctgatcgacgaagatccgcatcagccgcggacggccgacaaccccggcttttccccggagagcatcgcggaaatcggtgccacgatcaaagagcgcggggtgaagtcacccatttcggtgcgcgagaaccaggagcagccgggccgctatatcatcaatcacggcgcccgccgctaccgtggctcgaagtgggccggcaagaagtccatcccggcgttcatcgacaacgactacaacgaagccgaccaggttatcgagaacctgcaacgcaacgagctgaccccgcgcgaaattgccgacttcattggccgcgagctggcgaagggcaagaagaaaggcgatatcgccaaggaaatcggcaagtcgccggcgttcatcacccagcacgtcacgctgctggacctgccggagaagatcgccgatgcgttcaacaccggccgcgtgcgcgacgtgaccgtggtgaacgagctggtgacggccttcaagaagcgcccggaggaagtcgaggcgtggcttgacgacgacacccaggaaatcacgcgcggcacggtcaagctgctgcgcgagttcctggacgagaagggccgcgatcccaacaccgtcgatgccttcaacggccagactgatgccgagcgtgacgcggaggccggcgacggccaggacggcgaggacggcgaccaggacggtaaggacgccaaggaaaagggcgcgaaggagccggacccggacaagctgaaaaaggccatcgtccaggtcgagcacgacgagcgccctgcccgccttatcctcaaccgtcggccgccggcggaaggctatgcctggttgaagtacgaggacgacggccaggagttcgaggcgaaccttgccgacgtgaaactggtcgcgctcatcgagggctgatccccaaagacagcggcgcgggccacccgcgccgcacagacaacggttccgctacaaggaggaccgaagaatgaatccgatgctgttctacatcgcgggaggcgtaggcgcggcgttgctgctggtttccgcgatcatgctgttcaagctgcgcgagccgaagaaggaacaccgaccgcagcgcaaggcggcggccccgacgccgcagccggtcgataacgagctgctgcgcacctttcgccggccgtcgcaggccagccaacccgagccatccacgacgccgccggcgcggcgcactgccccgccgagcagcgaacaatccagagggaatgacggcgatttcgtcacgtcggccctggtggccggggcgaccaacagcaccatgctgggctacctggccggcggctcgctgaccggggccatgctgggcgatgcgctgcggccggatacgccgtctgcggcgttcgcggacccctcgccgtgcttcggcagcagcgacacggacagcggctggaccgataccggcagctcttgcgatttcagttcgtccgacaccgatacgaacaactggtgagggcggaccatgactgacgaacaaaagaaacggctcctgatgttgcaagctatccggcgcagcatccaggcaatgcgcaggggtgtttcggggccggatagtttcaagggctggttgaccggcatcggcatcatcgcggcggggttcctggttggcgagctgctgccatcccctgcccccggcgtcggcctggttgtgccaggggcctgcattgccggcttcgtcgtcggctgctggctcaacaggaaaggccgctcatggccgacagccatttacgaccaattggcccgttaccagccgctcaacgagcgggcgtaccgcgacctgcaagagacggtgaaggaacgcggcctcgactgcgatgcggtcatggagtggacctacatcgagcaggccgagttcatgcccctggtgcccaccagggaggacctagcgcgcgacaagttcctgaccgcgacgcgggccgatagggccgaggacgatgcgcgtgcgcgcttcgtcgtgctccatcccaagaagcgcggccccgacgcatgaagaagcccgacgcccgctaatccccttcccgctgaccctttgcccccgccgaccgtgcggggctttttttgcctgcccttcagccgctaaaaaacctgccgttaagtcgagaactgttcagctaaactcttgcgctgataaggtaggtaagagtattattattcttaccaattaccggagccaacatggaactgaacaaagagacgcgcgaccgcatttttgcggctgcggacgagctgttcgagcaaggcgaccgggagaacttcccgaccgtggatgcagtgcgtaaggccgcccgcgtcaacatgaacgacgccagcgccggcatgcgcgaatggcgacgccagcgcacggcgcaggccgccccgctggcagtccaggtgccggacgcggtgcagcaggccggcaaccaggccgtggccgccctctggcaagccgcccaggcccttgccaatgaatcgttgcaggcagcgcaagccggctgggatcgtgagcgcaacgagttggaagccgtgcgcggggagctggccgacgccttcgaggcgcaggcccgcgagctggaagaagcccaggcgcgcgttacattgctagagcagcaggccgccgaggcggccgagctggccgcacgccagcggcaagccctggccgaagcacgcaccgccctggcaggagccgagcagcgggccgcgctggcgacgcagcgggccgacgaggtggagcgtcgagcgcaggagctgcgcgccgagctggactacgctcaccaggacgcccgcgcattcaaagaagagagccgcaagaccctggacgcggccaaccaggaaatgcaggcgcttcgcggcgagcgcgacgccaccaggcgcgaagcggagagtttgcgcacggagttggcagcggtgaaagcgaaggcgcaggccgacgccgaggcccaccaggagcaaaggaagttggcggcgcaagaggcggccaggcaggccgagcgctttacgacggtgcaagccgagcgtgacgaagcgcggcaagaggcaaaggcagcccaagaagaggccgctatgttgaggggtcggctagacgcggaaacgagtgggaggaaacacaaagcgggaggaaagtaactgataaatcgaacgcagttcactaaaatagatggaacaaccttgacgcgcccggctctagggaaagccggcctcgaactgccgaggtcggcttttttttagccggcaagcgaccaggacacgtttaacaccagaggcaaccgtcaggagtcacccaatgaaacaccgcctcctggtcatgaatgggcaaagaattgtccagaccgagaaccaaggcgcatggacgaaccagaaggtagataaagccggggccctgaaacctggcatttacaacatctatatggcccaaaaggccgataagtcgcagcgccacgacggcagcatcgtccacgcagatagcggcagcatttaccaacaggtggggaagaactttgtaatgcacgcccggtcagatttcgataaagtacctgaaatcgggagtgcgaaaagcatcacctatgacgcaagtggcaaggcacaggtaagtgccgaaagcgtcaagttgagtcgcgggcgcactcgttagagttttagcggctaaaaagggaggcgtcttgagcagctacagcagagccgagcgcgcaccgtggggagacttcccgaaggtggttcgcaacggcgaccttggttctttgaccaacgagcctgaataccaggctgcgaagcagggcgacgcggaagcggcgcttaatttggtcgagcgcctgatttcggacgacactgttgcccagctcaagacgctgatcggcgacgacaagccccgcatcgttccagtcctcgccgtcgaggcggcggggaacaacaagattccggccatgatggcggtcgttctggccgaccgccttggccttgaggtcgaaacggacattgtgcagcgggagaaggtcgcccgaaccggagccggttcagatcatcgcctggcgttcaacccgactttcgagggggaggtgatccccggccagaagtacatcgttgtcgatgacacgctgacgatgggcggcaccattgcctcattacgcggctacatcgagaacaacggcggcaaggtcatggcggcgtccgtcatgaccgcccatgaaggcgcgcttgacctggcggtcaagccgaagatgcttgcgggcatcaatgagaaacacggtccagcaatggacgcattttggaaggaaacctttggctatggcatcgaccgactcacccaaggagaagccggacacctccgcgctgccccgtccgttgacgcaatccgagatcgcatcgctgcggctcgaaatgaagcagtcaatcgagtgggggcaagccgaactgcgacgacggcgcgagcagggcaacagcagtccccggcagtaaagcagtccagcggcaacagcggcgaggatttgctacaggcggcccaggaggccgagacggaacagcaggccctcttagaatccgcgcccatcgagcagacctaccagcagacccttgcgctctacgtgcaggcaaagcatgaccaggtggagcgcatcgaggaccgcctagaacagctcgtagaccgtcagcaggcgcgtttgcagcagctacagtccaatgcccccggcttgctgtccctgccgcgtacaaaggccgcctggcagcagcagcaggcccaacagcaagcccgcttgcagaccctgcacacgcggctggacatggtgcgcgaaatcaaggaaggcatgggcattcacgcgcccaagatcgaggaactggcgacgcgcaagatgcgcgcggagcatcccgagctggccggcgactgggattcgatgcgtgaagcagcccgacggcaccaggccctgatgcgcaagcaggagcaggagaagaaacaggcccaggagcgcgagcgcgggcgcagtcagagcttgggcctgtcaaacaagcccagctaacgcaaaaacaaagcccggcaacgccgggctttttcatctgcgcctctgcgattcataacgaggcccacaccaccagggcggccgcgaacaacaccatgccgccggcgatcatgttcatcatcgccacgcgccgcgcgtccgcgaccttggccgcgagctggcggccaaggccgtcgtcgatttccctgcggatcgcttcggccgcctgcgcggcgctgtccttcattaccttcgccattgcgtccttgctggccgccagggccgcgttcagcatccgctccgctttggccttggcgtcctcgccccaacgatgggcgatcccttccagctcttccttgaacgcggcaaggatttcctcttgcttggccgcactgtcggccatgagccgggcgttgatggtatgcaggatcagcaccgggtcgtcgcggccgacggcgatgccgtgcttggccgcaatctcccggatcagctcttcaatctggtcgctcatagcacggccgccgcgtcgagctgttcaaacaggccgcgccgcacgatcttgaggcgttgccgcgtcatgatcgtgagcgattcatcggccagcgcctggtcgaacgtcagccgctcttgcagcatgtcgctgaaatcgcggccgtaggtttcttccttgagggccggaatctggatgatggacgacacgcgggccttgttggccgtgtacgccttcatctgctcaaagctcttgccctcatgctcgataggcccccaatacgggttcagccagaccacgaaaagcgcttcggccgggaactggctggcgagctgggcgaagccgctcaccgtgtccaggagagcctggccgccggtgacgacggtatggatgaccagctcatgccccatttcttgcagcagagccggcacctggttgctgatgaggtaatgcgacagaggcacgaacgagctggcaccgttgtcgatcaccacgtcatccttggtcggcgcaatcagctcgaccagggtgtcgaagttgcgcgagttaatttcgtcgccggccatgatgttcagccggcggacgttcagggccttgtagccctcgaacgtcgcgttcaccgggtcggtgtcgatgcacaagggtgtctgccccttgtccatcttgtactgcgcaatgatcgcggcgatggccgacttgccgaccccgcccttgccctgcaaaaccatgtgaattttcgccattacagtagatcctttttgtccggtgttgggttgaaggtgaagccggtcggggccgcagcgggggccggcttttcagccttgcccccctgcttcggccgccgtggctccggcgtcttgggtgccggcgcgggttccgcagccttggcctgcggtgcgggcacatcggcgggcttggccttgatgtgccgcctggcgtgcgagcggaacgtctcgtaggagaacttgaccttccccgtttcccgcatgtgctcccaaatggtgacgagcgcatagccggacgctaacgccgcctcgacatccgccctcaccgccaggaacgcaaccgcagcctcatcacgccggcgcttcttggccgcgcgggattcaacccactcggccagctcgtcggtgtagctctttggcatcgtctctcgcctgtcccctcagttcagtaatttcctgcatttgcctgtttccagtcggtagatattccacaaaacagcagggaagcagcgcttttccgctgcataaccctgcttcggggtcattatagcgattttttcggtatatccatcctttttcgcacgatatacaggattttgccaaagggttcgtgtagactttccttggtgtatccaacggcgtcagccgggcaggataggtgaagtaggcccacccgcgagcgggtgttccttcttcactgtcccttattcgcacctggcggtgctcaacgggaatcctgctctgcgaggctggccggctaccgccggcgtaacagatgagggcaagcggatggctgatgaaaccaagccaaccaggaagggcagcccacctatcaaggtgtactgccttccagacgaacgaagagcgattgaggaaaaggcggcggcggccggcatgagcctgtcggcctacctgctggccgtcggccagggctacaaaatcacgggcgtcgtggactatgagcacgtccgcgagctggcccgcatcaatggcgacctgggccgcctgggcggcctgctgaaactctggctcaccgacgacccgcgcacggcgcggttcggtgatgccacgatcctcgccctgctggcgaagatcgaagagaagcaggacgagcttggcaaggtcatgatgggcgtggtccgcccgagggcagagccatgacttttttagccgctaaaacggccggggggtgcgcgtgattgccaagcacgtccccatgcgctccatcaagaagagcgacttcgcggagctggtgaagtacatcaccgacgagcaaggcaagaccgagcgctcttcttcaatcgctgccgtcagacggtcagggaacgccgacaggccccgctccgcgtagttcggagcaggacgccgcacggcgtccacatggatcatccacccacttcccaggcccgcgagggcctggttgatgcgggcggacactacttcgcgctgctggtcggtgctgcttgcgttgtcatcgcccttgtacagccaggcagccataaagctgccgttcttgcccacgattacgccgtcatcgacgacagcggcgtagttgagcagatcggccaggccggcgtccttggaacgatgctttttcagtttcagttcggcatcgaccgcgcggatgcgggcaaagaggatgaacaacagaagcgcgccgaggcccgcgattgcaatcgcaattgcttggatcatcggtattgcttcccttggctattggtgttctcgcggaacggggtcgagcgggccgggtaatacggcttgtaccggcggtgacgcaggtacacgaaccgcatcttcggatcggccttcgccatgattcggaacgcatagagcgccccgaaccacaggatcagaccgaccacggtggcccgcagctcttgggcgctgaaaatcagcgcaaacgccatcaggcccgagaacatcaccagttcacgatcaccacccatgaacaggttttctcggttgcctgcgcgacggatggggatcgtgcgcagagccatgattaggcgagccgtccagccgctaccgcacgcacggcatccgccgccgcgacttgcacctggtgcagcgccccgttgccgagggccgcgatttcggcaccacgaccgaagaaggtgctcatcacgttctgcgcgccgaccagcagcgccatcaccagaaccaggaagatcagggttcggaagaaggcgttgagttcgccgccgaagatcagcacgccgccggcgacgacgatgccgatgatggacagcgcgaaggccaccgggccggttacggagttgcgcaggttcgtcagccagctctcatatggcaagctgccgccggtgccttccgaggccatcgccggatgcgcggataacgcgagagcgagaacgaagaacacggcaaggtagaacaaaatgccgcgattcatggtcagacggaacggaacagccgttgtcattggaaatactccttacagggttttggtgatgtactggccgttctcgtaaccaagaacttcgagaatttcttgcactcgacggccgctaggggtcctggcgatatggacgaccacatgaaccgcctcgccaatcagcggctcaatgggtttcggtgaatccgggtgcatgctgataagcatggcgagccggctcaggcccgctttggggttgtttgcgtgcagggtggcggcacctccttcatgcccggtgttccaggccatcaacagatcaagggcttcggggccacgtacctcaccgaccaggatgcggtcggggcgcatacgcagcgttgtcttgagcagcagcgtcatcgagacgtcgatgctggtgtggtattggacggcgttctctgcggcgcactggatttcgccggtgtcctcgatgatgacgacgcgctcagacgggttgaaggcgaccatttcattgatgatcgcgttgacgagcgtggtcttgcccgagccagtaccgccaatgacgaggatgtttcgatgcgccgcgacggcgcttttaatgacctcgtattgctcgcgggtcatgatgcccgcctcgacgtactgttccagcgtgaagatggcgaccgcgcgcttgcggatcgcaaaggttggcgcggccacgaccggcggcaattggccggcaaagcggctgccatccaaggggaactcgccttccaggatgggcgaatgccgcgtgacctctttgccgtggaatccggccaccgtttctataatcgcctgcgactggctgggccgcatgtcgcagatgtaccgcatcggctcgccaaggcgttcgtgccacaccttgccgtccgcgttgagcatgacttcaacggttttcgggtcgttgagcgcggccaacaggtccgcacccatgtcgcgttccagcttgcgcttggcccgctccttgatggtctgaaactcttctttcccgctcacttttcagtaacccctacgcaacaaatcattagcaacattatcgcacaggcaaacgatataccgaaagtgtttagcctgcaagacaaacagctaatcgaaccgcacgacgtaggggttctgatagaaaacaactgtcaaagcgcacccgcccgatgccattcgcggcacggcttccgttgaggatgtcgatatgatgcgcgagccgacggcccgcagagaaggggccgttttagcggctaaagaaggaagtgcaagccctaacccttggcgtcagagccttccacgcagcttttttcgggtgtcgtcgccccatttctttacgataaacgccttatgtgacggcaaaaccacactgatgcgttcgtatccgggcggcacgctgctcttgaaaggatgacccgcaatctccgcgagtgcctcgcggtcaaggtcggtggactccaggagaagaggtaggggagtttccagggcgtcggcaatggcctccatcaccttcaacgaggggttggccttaccgttggttaagtctgataaaaacgaaattgaaacccctgccctctccgacagctcatgtttcgtcatgccccgctcatcgagcagacgaaggatgttggtgaaaaatatctggttgtacacagcggaagccgcccctcgcacctttggtcgcggcccgcaaaattttagccgctaaagttcttgacagcggaaccaatgtttagctaaactagagtctcctttctcaaggagactttcgatatgagccataatcagttccagtttatcggtaatcttacccgtgacaccgaggtacgtcatggcaattctaacaagccgcaagcaattttcgatatagcggttaatgaagagtggcgcaacgatgccggcgacaagcaggagcgcaccgacttcttccgcatcaagtgttttggctctcaggccgaggcccacggcaagtatttgggcaaggggtcgctggtattcgtgcagggcaagattcggaataccaagtacgagaaggacggccagacggtctacgggaccgacttcattgccgataaggtggattatctggacaccaaggcaccaggcgggtcaaatcaggaataagggcacattgccccggcgtgagtcggggcaatcccgcaaggagggtgaatgaatcggacgtttgaccggaaggcatacaggcaagaactgatcgacgcggggttttccgccgaggatgccgaaaccatcgcaagccgcaccgtcatgcgtgcgccccgcgaaaccttccagtccgtcggctcgatggtccagcaagctacggccaagatcgagcgcgacagcgtgcaactggctccccctgccctgcccgcgccatcggccgccgtggagcgttcgcgtcgtctcgaacaggaggcggcaggtttggcgaagtcgatgaccatcgacacgcgaggaactatgacgaccaagaagcgaaaaaccgccggcgaggacctggcaaaacaggtcagcgaggccaagcaggccgcgttgctgaaacacacgaagcagcagatcaaggaaatgcagctttccttgttcgatattgcgccgtggccggacacgatgcgagcgatgccaaacgacacggcccgctctgccctgttcaccacgcgcaacaagaaaatcccgcgcgaggcgctgcaaaacaaggtcattttccacgtcaacaaggacgtgaagatcacctacaccggcgtcgagctgcgggccgacgatgacgaactggtgtggcagcaggtgttggagtacgcgaagcgcacccctatcggcgagccgatcaccttcacgttctacgagctttgccaggacctgggctggtcgatcaatggccggtattacacgaaggccgaggaatgcctgtcgcgcctacaggcgacggcgatgggcttcacgtccgaccgcgttgggcacctggaatcggtgtcgctgctgcaccgcttccgcgtcctggaccgtggcaagaaaacgtcccgttgccaggtcctgatcgacgaggaaatcgtcgtgctgtttgctggcgaccactacacgaaattcatatgggagaagtaccgcaagctgtcgccgacggcccgacggatgttcgactatttcagctcgcaccgggagccgtacccgctcaagctggaaaccttccgcctcatgtgcggatcggattccacccgcgtgaagaagtggcgcgagcaggtcggcgaagcctgcgaagagttgcgaggcagcggcctggtggaacacgcctgggtcaatgatgacctggtgcattgcaaacgctag

SEQ ID NO: 201 - DNA, 15197 bp, Agrobacterium tumefaciens
  source 1..15197: mol_type = unassigned DNA
atgggtgttatccatgaagaaacggcttaccgaaagccagttccaggaggcgatccaggggctggaagtggggcagcagaccatcgagatagcgcggggcgtcttagtcgatgggaagccacaggcgacgttcgcaacgtcgctgggactgaccaggggcgcagtgtcgcaagcggtgcatcgcgtgtgggccgcgttcgaggacaagaacttgcccgaggggtacgcgcgggtaacggcggttctgccggaacatcaggcgtacatcgtccggaagtgggaagcggacgccaagaaaaaacaggaaaccaaacgatgaaaactttggtcacggccaaccagaaaggcggcgtcggcaagacttcgacccttgtgcatcttgccttcgactttttcgagcgcggcttgcgggttgccgtgatcgacctggacccccagggcaatgcgtcctacacgctcaaggactttgctaccggcctgcatgcaagcaagctgttcggcgctgtccctgccggcggctggaccgaaaccgcacccgcagccggcgacggccaggccgcgcgcctcgccctcatcgagtccaacccggtactggcgaacgccgaacggctgtcgctggacgacgcccgcgagctgttcggggcgaacatcaaggccctggcgaaccaaggcttcgacgtgtgcctgatcgacacggccccgacccttggcgtcggcctggcggccgccctcttcgcggccgactatgtgctgtcccccatcgagcttgaggcgtacagcatccagggcatcaagaagatggtcacgaccattgcgaacgtgcgccagaagaacgccaagctgcaattccttggcatggtgcccagcaaggtcgatgcgcggaatccgcgccacgcgcgccaccaagccgagctgctggccgcgtaccccaagatgatgattccggccaccgttggcctgcgcagcagcatcgccgatgccctcgcatccggtgtgccggtctggaagatcaagaaaacggccgcgcgcaaggcatcgaaagaggttcgcgccctggctgattacgtgttcacgaagatggagatttcccaatgactgcggctcaagccaagaccaccaagaaaaacaccgctgcggccgctcaggaagccgcaggcgcggcgcagccgtccggcctggggttggatagcatcggcgacctgtcgagcctcctggacgctcctgcggcgtctcagggcggttccggccctatcgagctggacctggacctgatcgacgaagatccgcatcagccgcggacggccgacaaccccggcttttccccggagagcatcgcggaaatcggtgccacgatcaaagagcgcggggtgaagtcacccatttcggtgcgcgagaaccaggagcagccgggccgctatatcatcaatcacggcgcccgccgctaccgtggctcgaagtgggccggcaagaagtccatcccggcgttcatcgacaacgactacaacgaagccgaccaggttatcgagaacctgcaacgcaacgagctgaccccgcgcgaaattgccgacttcattggccgcgagctggcgaagggcaagaagaaaggcgatatcgccaaggaaatcggcaagtcgccggcgttcatcacccagcacgtcacgctgctggacctgccggagaagatcgccgatgcgttcaacaccggccgcgtgcgcgacgtgaccgtggtgaacgagctggtgacggccttcaagaagcgcccggaggaagtcgaggcgtggcttgacgacgacacccaggaaatcacgcgcggcacggtcaagctgctgcgcgagttcctggacgagaagggccgcgatcccaacaccgtcgatgccttcaacggccagactgatgccgagcgtgacgcggaggccggcgacggccaggacggcgaggacggcgaccaggacggtaaggacgccaaggaaaagggcgcgaaggagccggacccggacaagctgaaaaaggccatcgtccaggtcgagcacgacgagcgccctgcccgccttatcctcaaccgtcggccgccggcggaaggctatgcctggttgaagtacgaggacgacggccaggagttcgaggcgaaccttgccgacgtgaaactggtcgcgctcatcgagggctgatccccaaagacagcggcgcgggccacccgcgccgcacagacaacggttccgctacaaggaggaccgaagaatgaatccgatgctgttctacatcgcgggaggcgtaggcgcggcgttgctgctggtttccgcgatcatgctgttcaagctgcgcgagccgaagaaggaacaccgaccgcagcgcaaggcggcggccccgacgccgcagccggtcgataacgagctgctgcgcacctttcgccggccgtcgcaggccagccaacccgagccatccacgacgccgccggcgcggcgcactgccccgccgagcagcgaacaatccagagggaatgacggcgatttcgtcacgtcggccctggtggccggggcgaccaacagcaccatgctgggctacctggccggcggctcgctgaccggggccatgctgggcgatgcgctgcggccggatacgccgtctgcggcgttcgcggacccctcgccgtgcttcggcagcagcgacacggacagcggctggaccgataccggcagctcttgcgatttcagttcgtccgacaccgatacgaacaactggtgagggcggaccatgactgacgaacaaaagaaacggctcctgatgttgcaagctatccggcgcagcatccaggcaatgcgcaggggtgtttcggggccggatagtttcaagggctggttgaccggcatcggcatcatcgcggcggggttcctggttggcgagctgctgccatcccctgcccccggcgtcggcctggttgtgccaggggcctgcattgccggcttcgtcgtcggctgctggctcaacaggaaaggccgctcatggccgacagccatttacgaccaattggcccgttaccagccgctcaacgagcgggcgtaccgcgacctgcaagagacggtgaaggaacgcggcctcgactgcgatgcggtcatggagtggacctacatcgagcaggccgagttcatgcccctggtgcccaccagggaggacctagcgcgcgacaagttcctgaccgcgacgcgggccgatagggccgaggacgatgcgcgtgcgcgcttcgtcgtgctccatcccaagaagcgcggccccgacgcatgaagaagcccgacgcccgctaatccccttcccgctgaccctttgcccccgccgaccgtgcggggctttttttgcctgcccttcagccgctaaaaaacctgccgttaagtcgagaactgttcagctaaactcttgcgctgataaggtaggtaagagtattattattcttaccaattaccggagccaacatggaactgaacaaagagacgcgcgaccgcatttttgcggctgcggacgagctgttcgagcaaggcgaccgggagaacttcccgaccgtggatgcagtgcgtaaggccgcccgcgtcaacatgaacgacgccagcgccggcatgcgcgaatggcgacgccagcgcacggcgcaggccgccccgctggcagtccaggtgccggacgcggtgcagcaggccggcaaccaggccgtggccgccctctggcaagccgcccaggcccttgccaatgaatcgttgcaggcagcgcaagccggctgggatcgtgagcgcaacgagttggaagccgtgcgcggggagctggccgacgccttcgaggcgcaggcccgcgagctggaagaagcccaggcgcgcgttacattgctagagcagcaggccgccgaggcggccgagctggccgcacgccagcggcaagccctggccgaagcacgcaccgccctggcaggagccgagcagcgggccgcgctggcgacgcagcgggccgacgaggtggagcgtcgagcgcaggagctgcgcgccgagctggactacgctcaccaggacgcccgcgcattcaaagaagagagccgcaagaccctggacgcggccaaccaggaaatgcaggcgcttcgcggcgagcgcgacgccaccaggcgcgaagcggagagtttgcgcacggagttggcagcggtgaaagcgaaggcgcaggccgacgccgaggcccaccaggagcaaaggaagttggcggcgcaagaggcggccaggcaggccgagcgctttacgacggtgcaagccgagcgtgacgaagcgcggcaagaggcaaaggcagcccaagaagaggccgctatgttgaggggtcggctagacgcggaaacgagtgggaggaaacacaaagcgggaggaaagtaactgataaatcgaacgcagttcactaaaatagatggaacaaccttgacgcgcccggctctagggaaagccggcctcgaactgccgaggtcggcttttttttagccggcaagcgaccaggacacgtttaacaccagaggcaaccgtcaggagtcacccaatgaaacaccgcctcctggtcatgaatgggcaaagaattgtccagaccgagaaccaaggcgcatggacgaaccagaaggtagataaagccggggccctgaaacctggcatttacaacatctatatggcccaaaaggccgataagtcgcagcgccacgacggcagcatcgtccacgcagatagcggcagcatttaccaacaggtggggaagaactttgtaatgcacgcccggtcagatttcgataaagtacctgaaatcgggagtgcgaaaagcatcacctatgacgcaagtggcaaggcacaggtaagtgccgaaagcgtcaagttgagtcgcgggcgcactcgttagagttttagcggctaaaaagggaggcgtcttgagcagctacagcagagccgagcgcgcaccgtggggagacttcccgaaggtggttcgcaacggcgaccttggttctttgaccaacgagcctgaataccaggctgcgaagcagggcgacgcggaagcggcgcttaatttggtcgagcgcctgatttcggacgacactgttgcccagctcaagacgctgatcggcgacgacaagccccgcatcgttccagtcctcgccgtcgaggcggcggggaacaacaagattccggccatgatggcggtcgttctggccgaccgccttggccttgaggtcgaaacggacattgtgcagcgggagaaggtcgcccgaaccggagccggttcagatcatcgcctggcgttcaacccgactttcgagggggaggtgatccccggccagaagtacatcgttgtcgatgacacgctgacgatgggcggcaccattgcctcattacgcggctacatcgagaacaacggcggcaaggtcatggcggcgtccgtcatgaccgcccatgaaggcgcgcttgacctggcggtcaagccgaagatgcttgcgggcatcaatgagaaacacggtccagcaatggacgcattttggaaggaaacctttggctatggcatcgaccgactcacccaaggagaagccggacacctccgcgctgccccgtccgttgacgcaatccgagatcgcatcgctgcggctcgaaatgaagcagtcaatcgagtgggggcaagccgaactgcgacgacggcgcgagcagggcaacagcagtccccggcagtaaagcagtccagcggcaacagcggcgaggatttgctacaggcggcccaggaggccgagacggaacagcaggccctcttagaatccgcgcccatcgagcagacctaccagcagacccttgcgctctacgtgcaggcaaagcatgaccaggtggagcgcatcgaggaccgcctagaacagctcgtagaccgtcagcaggcgcgtttgcagcagctacagtccaatgcccccggcttgctgtccctgccgcgtacaaaggccgcctggcagcagcagcaggcccaacagcaagcccgcttgcagaccctgcacacgcggctggacatggtgcgcgaaatcaaggaaggcatgggcattcacgcgcccaagatcgaggaactggcgacgcgcaagatgcgcgcggagcatcccgagctggccggcgactgggattcgatgcgtgaagcagcccgacggcaccaggccctgatgcgcaagcaggagcaggagaagaaacaggcccaggagcgcgagcgcgggcgcagtcagagcttgggcctgtcaaacaagcccagctaacgcaaaaacaaagcccggcaacgccgggctttttcatctgcgcctctgcgattcataacgaggcccacaccaccagggcggccgcgaacaacaccatgccgccggcgatcatgttcatcatcgccacgcgccgcgcgtccgcgaccttggccgcgagctggcggccaaggccgtcgtcgatttccctgcggatcgcttcggccgcctgcgcggcgctgtccttcattaccttcgccattgcgtccttgctggccgccagggccgcgttcagcatccgctccgctttggccttggcgtcctcgccccaacgatgggcgatcccttccagctcttccttgaacgcggcaaggatttcctcttgcttggccgcactgtcggccatgagccgggcgttgatggtatgcaggatcagcaccgggtcgtcgcggccgacggcgatgccgtgcttggccgcaatctcccggatcagctcttcaatctggtcgctcatagcacggccgccgcgtcgagctgttcaaacaggccgcgccgcacgatcttgaggcgttgccgcgtcatgatcgtgagcgattcatcggccagcgcctggtcgaacgtcagccgctcttgcagcatgtcgctgaaatcgcggccgtaggtttcttccttgagggccggaatctggatgatggacgacacgcgggccttgttggccgtgtacgccttcatctgctcaaagctcttgccctcatgctcgataggcccccaatacgggttcagccagaccacgaaaagcgcttcggccgggaactggctggcgagctgggcgaagccgctcaccgtgtccaggagagcctggccgccggtgacgacggtatggatgaccagctcatgccccatttcttgcagcagagccggcacctggttgctgatgaggtaatgcgacagaggcacgaacgagctggcaccgttgtcgatcaccacgtcatccttggtcggcgcaatcagctcgaccagggtgtcgaagttgcgcgagttaatttcgtcgccggccatgatgttcagccggcggacgttcagggccttgtagccctcgaacgtcgcgttcaccgggtcggtgtcgatgcacaagggtgtctgccccttgtccatcttgtactgcgcaatgatcgcggcgatggccgacttgccgaccccgcccttgccctgcaaaaccatgtgaattttcgccattacagtagatcctttttgtccggtgttgggttgaaggtgaagccggtcggggccgcagcgggggccggcttttcagccttgcccccctgcttcggccgccgtggctccggcgtcttgggtgccggcgcgggttccgcagccttggcctgcggtgcgggcacatcggcgggcttggccttgatgtgccgcctggcgtgcgagcggaacgtctcgtaggagaacttgaccttccccgtttcccgcatgtgctcccaaatggtgacgagcgcatagccggacgctaacgccgcctcgacatccgccctcaccgccaggaacgcaaccgcagcctcatcacgccggcgcttcttggccgcgcgggattcaacccactcggccagctcgtcggtgtagctctttggcatcgtctctcgcctgtcccctcagttcagtaatttcctgcatttgcctgtttccagtcggtagatattccacaaaacagcagggaagcagcgcttttccgctgcataaccctgcttcggggtcattatagcgattttttcggtatatccatcctttttcgcacgatatacaggattttgccaaagggttcgtgtagactttccttggtgtatccaacggcgtcagccgggcaggataggtgaagtaggcccacccgcgagcgggtgttccttcttcactgtcccttattcgcacctggcggtgctcaacgggaatcctgctctgcgaggctggccggctaccgccggcgtaacagatgagggcaagcggatggctgatgaaaccaagccaaccaggaagggcagcccacctatcaaggtgtactgccttccagacgaacgaagagcgattgaggaaaaggcggcggcggccggcatgagcctgtcggcctacctgctggccgtcggccagggctacaaaatcacgggcgtcgtggactatgagcacgtccgcgagctggcccgcatcaatggcgacctgggccgcctgggcggcctgctgaaactctggctcaccgacgacccgcgcacggcgcggttcggtgatgccacgatcctcgccctgctggcgaagatcgaagagaagcaggacgagcttggcaaggtcatgatgggcgtggtccgcccgagggcagagccatgacttttttagccgctaaaacggccggggggtgcgcgtgattgccaagcacgtccccatgcgctccatcaagaagagcgacttcgcggagctggtgaagtacatcaccgacgagcaaggcaagaccgagcgctcttcttcaatcgctgccgtcagacggtcagggaacgccgacaggccccgctccgcgtagttcggagcaggacgccgcacggcgtccacatggatcatccacccacttcccaggcccgcgagggcctggttgatgcgggcggacactacttcgcgctgctggtcggtgctgcttgcgttgtcatcgcccttgtacagccaggcagccataaagctgccgttcttgcccacgattacgccgtcatcgacgacagcggcgtagttgagcagatcggccaggccggcgtccttggaacgatgctttttcagtttcagttcggcatcgaccgcgcggatgcgggcaaagaggatgaacaacagaagcgcgccgaggcccgcgattgcaatcgcaattgcttggatcatcggtattgcttcccttggctattggtgttctcgcggaacggggtcgagcgggccgggtaatacggcttgtaccggcggtgacgcaggtacacgaaccgcatcttcggatcggccttcgccatgattcggaacgcatagagcgccccgaaccacaggatcagaccgaccacggtggcccgcagctcttgggcgctgaaaatcagcgcaaacgccatcaggcccgagaacatcaccagttcacgatcaccacccatgaacaggttttctcggttgcctgcgcgacggatggggatcgtgcgcagagccatgattaggcgagccgtccagccgctaccgcacgcacggcatccgccgccgcgacttgcacctggtgcagcgccccgttgccgagggccgcgatttcggcaccacgaccgaagaaggtgctcatcacgttctgcgcgccgaccagcagcgccatcaccagaaccaggaagatcagggttcggaagaaggcgttgagttcgccgccgaagatcagcacgccgccggcgacgacgatgccgatgatggacagcgcgaaggccaccgggccggttacggagttgcgcaggttcgtcagccagctctcatatggcaagctgccgccggtgccttccgaggccatcgccggatgcgcggataacgcgagagcgagaacgaagaacacggcaaggtagaacaaaatgccgcgattcatggtcagacggaacggaacagccgttgtcattggaaatactccttacagggttttggtgatgtactggccgttctcgtaaccaagaacttcgagaatttcttgcactcgacggccgctaggggtcctggcgatatggacgaccacatgaaccgcctcgccaatcagcggctcaatgggtttcggtgaatccgggtgcatgctgataagcatggcgagccggctcaggcccgctttggggttgtttgcgtgcagggtggcggcacctccttcatgcccggtgttccaggccatcaacagatcaagggcttcggggccacgtacctcaccgaccaggatgcggtcggggcgcatacgcagcgttgtcttgagcagcagcgtcatcgagacgtcgatgctggtgtggtattggacggcgttctctgcggcgcactggatttcgccggtgtcctcgatgatgacgacgcgctcagacgggttgaaggcgaccatttcattgatgatcgcgttgacgagcgtggtcttgcccgagccagtaccgccaatgacgaggatgtttcgatgcgccgcgacggcgcttttaatgacctcgtattgctcgcgggtcatgatgcccgcctcgacgtactgttccagcgtgaagatggcgaccgcgcgcttgcggatcgcaaaggttggcgcggccacgaccggcggcaattggccggcaaagcggctgccatccaaggggaactcgccttccaggatgggcgaatgccgcgtgacctctttgccgtggaatccggccaccgtttctataatcgcctgcgactggctgggccgcatgtcgcagatgtaccgcatcggctcgccaaggcgttcgtgccacaccttgccgtccgcgttgagcatgacttcaacggttttcgggtcgttgagcgcggccaacaggtccgcacccatgtcgcgttccagcttgcgcttggcccgctccttgatggtctgaaactcttctttcccgctcacttttcagtaacccctacgcaacaaatcattagcaacattatcgcacaggcaaacgatataccgaaagtgtttagcctgcaagacaaacagctaatcgaaccgcacgacgtaggggttctgatagaaaacaactgtcaaagcgcacccgcccgatgccattcgcggcacggcttccgttgaggatgtcgatatgatgcgcgagccgacggcccgcagagaaggggccgttttagcggctaaagaaggaagtgcaagccctaacccttggcgtcagagccttccacgcagcttttttcgggtgtcgtcgccccatttctttacgataaacgccttatgtgacggcaaaaccacactgatgcgttcgtatccgggcggcacgctgctcttgaaaggatgacccgcaatctccgcgagtgcctcgcggtcaaggtcggtggactccaggagaagaggtaggggagtttccagggcgtcggcaatggcctccatcaccttcaacgaggggttggccttaccgttggttaagtctgataaaaacgaaattgaaacccctgccctctccgacagctcatgtttcgtcatgccccgctcatcgagcagacgaaggatgttggtgaaaaatatctggttgtacacagcggaagccgcccctcgcacctttggtcgcggcccgcaaaattttagccgctaaagttcttgacagcggaaccaatgtttagctaaactagagtctcctttctcaaggagactttcgatatgagccataatcagttccagtttatcggtaatcttacccgtgacaccgaggtacgtcatggcaattctaacaagccgcaagcaattttcgatatagcggttaatgaagagtggcgcaacgatgccggcgacaagcaggagcgcaccgacttcttccgcatcaagtgttttggctctcaggccgaggcccacggcaagtatttgggcaaggggtcgctggtattcgtgcagggcaagattcggaataccaagtacgagaaggacggccagacggtctacgggaccgacttcattgccgataaggtggattatctggacaccaaggcaccaggcgggtcaaatcaggaataagggcacattgccccggcgtgagtcggggcaatcccgcaaggagggtgaatgaatcggacgtttgaccggaaggcatacaggcaagaactgatcgacgcggggttttccgccgaggatgccgaaaccatcgcaagccgcaccgtcatgcgtgcgccccgcgaaaccttccagtccgtcggctcgatggtccagcaagctacggccaagatcgagcgcgacagcgtgcaactggctccccctgccctgcccgcgccatcggccgccgtggagcgttcgcgtcgtctcgaacaggaggcggcaggtttggcgaagtcgatgaccatcgacacgcgaggaactatgacgaccaagaagcgaaaaaccgccggcgaggacctggcaaaacaggtcagcgaggccaagcaggccgcgttgctgaaacacacgaagcagcagatcaaggaaatgcagctttccttgttcgatattgcgccgtggccggacacgatgcgagcgatgccaaacgacacggcccgctctgccctgttcaccacgcgcaacaagaaaatcccgcgcgaggcgctgcaaaacaaggtcattttccacgtcaacaaggacgtgaagatcacctacaccggcgtcgagctgcgggccgacgatgacgaactggtgtggcagcaggtgttggagtacgcgaagcgcacccctatcggcgagccgatcaccttcacgttctacgagctttgccaggacctgggctggtcgatcaatggccggtattacacgaaggccgaggaatgcctgtcgcgcctacaggcgacggcgatgggcttcacgtccgaccgcgttgggcacctggaatcggtgtcgctgctgcaccgcttccgcgtcctggaccgtggcaagaaaacgtcccgttgccaggtcctgatcgacgaggaaatcgtcgtgctgtttgctggcgaccactacacgaaattcatatgggagaagtaccgcaagctgtcgccgacggcccgacggatgttcgactatttcagctcgcaccgggagccgtacccgctcaagctggaaaccttccgcctcatgtgcggatcggattccacccgcgtgaagaagtggcgcgagcaggtcggcgaagcctgcgaagagttgcgaggcagcggcctggtggaacacgcctgggtcaatgatgacctggtgcattgcaaacgctagggccttgtggggtcagttccggctgggggttcagcagccagcgctttactggcatttcaggaacaagcgggcactgctcgacgcacttgcttcgctcagtatcgctcgggacgcacggcgcgctctacgaactgccgataaacagaggattaaaattgacaattgtgattaaggctcagattcgacggcttggagcggccgacgtgcaggatttccgcgagatccgattgtcggccctgaagaaagctccagagatgttcgggtccgtttacgagcacgaggagaaaaagcccatggaggcgttcgctgaacggttgcgagatgccgtggcattcggcgcctacatcgacggcgagatcattgggctgtcggtcttcaaacaggaggacggccccaaggacgctcacaaggcgcatctgtccggcgttttcgtggagcccgaacagcgaggccgaggggtcgccggtatgctgctgcgggcgttgccggcgggtttattgctcgtgatgatcgtccgacagattccaacgggaatctggtggatgcgcatcttcatcctcggcgcacttaatatttcgctattctggagcttgttgtttatttcggtctaccgcctgccgggcggggtcgcggcgacggtaggcgctgtgcagccgctgatggtcgtgttcatctctgccgctctgctaggtagcccgatacgattgatggcggtcctgggggctatttgcggaactgcgggcgtggcgctgttggtgttgacaccaaacgcagcgctagatcctgtcggcgtcgcagcgggcctggcgggggcggtttccatggcgttcggaaccgtgctgacccgcaagtggcaacctcccgtgcctctgctcacctttaccgcctggcaactggcggccggaggacttctgctcgttccagtagctttagtgtttgatccgccaatcccgatgcctacaggaaccaatgttctcggcctggcgtggctcggcctgatcggagcgggtttaacctacttcctttggttccgggggatctcgcgactcgaacctacagttgtttccttactgggctttctcagcccggggaccgccgtgttgctaggatggttgttcttggatcagacgctgagtgcgcttcaaatcatcggcgtcctgctcgtgatcgggagtatctggctgggccaacgttccaaccgcactcctagattgcgcgtcccccttggtcaaattgggtatacccatttgggcctagtctagccggcatggcgcattacagcaatacgcaatttaaatgcgcctagcgcattttcccgaccttaatgcgcctcgcgctgtagcctcacgcccacatatgtgctaatgtggttacgtgtattttatggaggttatccaatgagccgcctgacaatcgacatgacggaccagcagcaccagagcctgaaagccctggccgccttgcagggcaagaccattaagcaatacgccctcgaacgtctgttccccggtgacgctgatgccgatcaggcatggcaggaactgaaaaccatgctggggaaccgcatcaacgatgggcttgccggcaaggtgtccaccaagagcgtcggcgaaattcttgatgaagaactcagcggggatcgcgcttgacggcctacatcctcacggctgaggccgaagccgatctacgcggcatcatccgctacacgcgccgggagtggggcgcggcgcaggtgcgccgctatatcgctaagctggaacagggcatagccaggcttgccgccggcgaaggcccgtttaaggacatgagcgaactctttcccgcgctgcggatggcccgctgcgaacaccactacgttttttgcctgccgcgtgcgggcgaacccgcgttggtcgtggcgatcctgcatgagcgcatggacctcatgacgcgacttgccgacaggctcaagggctgatttcagccgctaaaaatcgcgccactcacaacgtcctgatggcgtactaagctggg

SEQ ID NO: 202 - DNA, 3671 bp, Agrobacterium tumefaciens
  source 1..3671: mol_type = unassigned DNA
tcagcctgccgccttgggccgggtgatgtcgtacttgcccgccgcgaactcggttaccgtccagcccagcgcgaccagctccggcaacgcctcgcgcacccgctggcggcgcttgcgcatggtcgaaccactggcctctgacggccagacatagccgcacaaggtatctatggaagccttgccggttttgccggggtcgatccagccacacagccgctggtgcagcaggcgggcggtttcgctgtccagcgcccgcacctcgtccatgctgatgcgcacatgctggccgccacccatgacggcctgcgcgatcaaggggttcagggccacgtacaggcgcccgtccgcctcgtcgctggcgtactccgacagcagccgaaacccctgccgcttgcggccattctgggcgatgatggataccttccaaaggcgctcgatgcagtcctgtatgtgcttgagcgccccaccactatcgacctctgccccgatttcctttgccagcgcccgatagctacctttgaccaccatggcatcagcggtgacggcctcccacttgggttccaggaacagccggagctgccgtccgccttcggtcttgggttccgggccaagcactaggccattaggcccagccatggccaccagcccttgcaggatgcgcagatcatcagcgcccagcggctccgggccgctgaactcgatccgcttgccgtcgccgtagtcatacgtcacgtccagcttgctgcgcttgcgctcgccccgcttgagggcacggaacaggccgggggccagacagtgcgccgggtcgtgccggacgtggctgaggctgtgcttgttcttaggcttcaccacggggcacccccttgctcttgcgctgcctctccagcacggcgggcttgagcaccccgccgtcatgccgcctgaaccaccgatcagcgaacggtgcgccatagttggccttgctcacaccgaagcggacgaagaaccggcgctggtcgtcgtccacaccccattcctcggcctcggcgctggtcatgctcgacaggtaggactgccagcggatgttatcgaccagtaccgagctgccccggctggcctgctgctggtcgcctgcgcccatcatggccgcgcccttgctggcatggtgcaggaacacgatagagcacccggtatcggcggcgatggcctccatgcgaccgatgacctgggccatggggccgctggcgttttcttcctcgatgtggaaccggcgcagcgtgtccagcaccatcaggcggcggccctcggcggcgcgcttgaggccgtcgaaccactccggggccatgatgttgggcaggctgccgatcagcggctggatcagcaggccgtcagccacggcttgccgttcctcggcgctgaggtgcgccccaagggcgtgcaggcggtgatgaatggcggtgggcgggtcttcggcgggcaggtagatcaccgggccggtgggcagttcgcccacctccagcagatccggcccgcctgcaatctgtgcggccagttgcagggccagcatggatttaccggcaccaccgggcgacaccagcgccccgaccgtaccggccaccatgttgggcaaaacgtagtccagcggtggcggcgctgctgcgaacgcctccagaatattgataggcttatgggtagccattgattgcctcctttgcaggcagttggtggttaggcgctggcggggtcactacccccgccctgcgccgctctgagttcttccaggcactcgcgcagcgcctcgtattcgtcgtcggtcagccagaacttgcgctgacgcatccctttggccttcatgcgctcggcatatcgcgcttggcgtacagcgtcagggctggccagcaggtcgccggtctgcttgtccttttggtctttcatatcagtcaccgagaaacttgccggggccgaaaggcttgtcttcgcggaacaaggacaaggtgcagccgtcaaggttaaggctggccatatcagcgactgaaaagcggccagcctcggccttgtttgacgtataaccaaagccaccgggcaaccaatagcccttgtcacttttgatcaggtagaccgaccctgaagcgcttttttcgtattccataaaacccccttctgtgcgtgagtactcatagtataacaggcgtgagtaccaacgcaagcactacatgctgaaatctggcccgcccctgtccatgcctcgctggcggggtgccggtgcccgtgccagctcggcccgcgcaagctggacgctgggcagacccatgaccttgctgacggtgcgctcgatgtaatccgcttcgtggccgggcttgcgctctgccagcgctgggctggcctcggccatggccttgccgatttcctcggcactgcggccccggctggccagcttctgcgcggcgataaagtcgcacttgctgaggtcatcaccgaagcgcttgaccagcccggccatctcgctgcggtactcgtccagcgccgtgcgccggtggcggctaagctgccgctcgggcagttcgaggctggccagcctgcgggccttctcctgctgccgctgggcctgctcgatctgctggccagcctgctgcaccagcgccgggccagcggtggcggtcttgcccttggattcacgcagcagcacccacggctgataaccggcgcgggtggtgtgcttgtccttgcggttggtgaagcccgccaagcggccatagtggcggctgtcggcgctggccgggtcggcgtcgtactcgctggccagcgtccgggcaatctgcccccgaagttcaccgcctgcggcgtcggccaccttgacccatgcctgatagttcttcgggctggtttccactaccagggcaggctcccggccctcggctttcatgtcatccaggtcaaactcgctgaggtcgtccaccagcaccagaccatgccgctcctgctcggcgggcctgatatacacgtcattgccctgggcattcatccgcttgagccatggcgtgttctggagcacttcggcggctgaccattcccggttcatcatctggccggtggtggcgtccctgacgccgatatcgaagcgctcacagcccatggccttgagctgtcggcctatggcctgcaaagtcctgtcgttcttcatcgggccaccaagcgattcccacacattatacgagccggaagcataaagtgtagctagatccgaaggatgagccgggctgaatgatcgaccgagacaggccctgcggggctgcacacgcgcccccacccttcgggtagggggaaaggccgctaaagcggctaaaagcgctccagcgtatttctgcggggtttggtgtggggtttagcgggctttgcccgcctttccccctgccgcgcagcggtggggcggtgtgtagcctagcgcagcgaatagaccagctatccggcctctggccgggcatattgggcaagggcagcagcgccccacaagggcgctgataaccgcgcctagtggattattcttagataatcatggatggatttttccaacaccccgccagcccccgcccctgctgggtttgcaggtttgggggcgtgacagttattgcaggggttcgtgacagttattgcaggggggcgtgacagttattgcaggggttcgtgacagttag

SEQ ID NO: 203 - DNA, 1329 bp, Arabidopsis thaliana
  source 1..1329: mol_type = unassigned DNA
atgcatcgcgcgagcagcaaacataccaacgcgaaaaaagaagcgattagcaccagcaaaattcgcgataacaacgtgcgcgtgacccgcagccgcgcgaaagcgctgggcgtgagcaacagcccgagcaaaccggcgtttaaacatgaaaccaaacgcgtggcgcgcccgagcaacaaacgcatggcgagcgataacattaccgtgtgcaaccagaaacgccgcgcggtgctgaaagatgtgaccaacaccctggcggaaagcattattagcaccgaaggcaacgtgaaagcgtgcaaacgcggcggcaaagaaaccaaacagattgaagaagatggcctggtggatgtggatggcgaaaaaagcaaactggcggaagatctgagcaaaattcgcatggtggaaagcctggatgcgagcgcgagcaaacagaaactggtggattgcgcggaagaagatcgcagcgatgtgaccgattgcgtgcagattgtggatattgatagcggcgtgcaggatccgcagttttgcagcctgtatgcggcgagcatttatgatagcattaacgtggcggaactggaacagcgcccgagcaccagctatatggtgcaggtgcagcgcgatattgatccgaccatgcgcggcattctgattgattggctggtggaagtgagcgaagaatataaactggtgagcgataccctgtatctgaccgtgaacctgattgatcgctttatgagccataactatattgaaaaacagaaactgcagctgctgggcattacctgcatgctgattgcgagcaaatatgaagaaattagcgcgccgcgcctggaagaattttgctttattaccgataacacctatacccgcctggaagtgctgagcatggaaattaaagtgctgaacagcctgcattttcgcctgagcgtgccgaccaccaaaacctttctgcgccgctttattcgcgcggcgcaggcgagcgataaagtgccgctgattgaaatggaatatctggcgaactattttgcggaactgaccctgaccgaatatacctttctgcgctttctgccgagcctgattgcggcgagcgcggtgtttctggcgcgctggaccctggatcagagcaaccatccgtggaaccagaccctgcagcattatacccgctatgaaaccagcgcgctgaaaaacaccgtgctggcgatggaagaactgcagctgaacaccagcggcagcaccctgattgcgattcataccaaatataaccagcagaaatttaaacgcgtggcgaccctgaccagcccggaacgcgtgaacaccctgtttagccgc

SEQ ID NO: 204 - protein, 443 aa, Arabidopsis thaliana
MHRASSKHTNAKKEAISTSKIRDNNVRVTRSRAKALGVSNSPSKPAFKHETKRVARPSNKRMASDNITVCNQKRRAVLKDVTNTLAESIISTEGNVKACKRGGKETKQIEEDGLVDVDGEKSKLAEDLSKIRMVESLDASASKQKLVDCAEEDRSDVTDCVQIVDIDSGVQDPQFCSLYAASIYDSINVAELEQRPSTSYMVQVQRDIDPTMRGILIDWLVEVSEEYKLVSDTLYLTVNLIDRFMSHNYIEKQKLQLLGITCMLIASKYEEISAPRLEEFCFITDNTYTRLEVLSMEIKVLNSLHFRLSVPTTKTFLRRFIRAAQASDKVPLIEMEYLANYFAELTLTEYTFLRFLPSLIAASAVFLARWTLDQSNHPWNQTLQHYTRYETSALKNTVLAMEELQLNTSGSTLIAIHTKYNQQKFKRVATLTSPERVNTLFSR

SEQ ID NO: 205 - DNA, 1308 bp, Arabidopsis thaliana
  source 1..1308: mol_type = unassigned DNA
atgtattgcagcagcagcatgcatccgaacgcgaacaaagaaaacattagcaccagcgatgtgcaggaaagctttgtgcgcattacccgcagccgcgcgaaaaaagcgatgggccgcggcgtgagcattccgccgaccaaaccgagctttaaacagcagaaacgccgcgcggtgctgaaagatgtgagcaacaccagcgcggatattatttatagcgaactgcgcaaaggcggcaacattaaagcgaaccgcaaatgcctgaaagaaccgaaaaaagcggcgaaagaaggcgcgaacagcgcgatggatattctggtggatatgcataccgaaaaaagcaaactggcggaagatctgagcaaaattcgcatggcggaagcgcaggatgtgagcctgagcaactttaaagatgaagaaattaccgaacagcaggaagatggcagcggcgtgatggaactgctgcaggtggtggatattgatagcaacgtggaagatccgcagtgctgcagcctgtatgcggcggatatttatgataacattcatgtggcggaactgcagcagcgcccgctggcgaactatatggaactggtgcagcgcgatattgatccggatatgcgcaaaattctgattgattggctggtggaagtgagcgatgattataaactggtgccggataccctgtatctgaccgtgaacctgattgatcgctttctgagcaacagctatattgaacgccagcgcctgcagctgctgggcgtgagctgcatgctgattgcgagcaaatatgaagaactgagcgcgccgggcgtggaagaattttgctttattaccgcgaacacctatacccgcccggaagtgctgagcatggaaattcagattctgaactttgtgcattttcgcctgagcgtgccgaccaccaaaacctttctgcgccgctttattaaagcggcgcaggcgagctataaagtgccgtttattgaactggaatatctggcgaactatctggcggaactgaccctggtggaatatagctttctgcgctttctgccgagcctgattgcggcgagcgcggtgtttctggcgcgctggaccctggatcagaccgatcatccgtggaacccgaccctgcagcattatacccgctatgaagtggcggaactgaaaaacaccgtgctggcgatggaagatctgcagctgaacaccagcggctgcaccctggcggcgacccgcgaaaaatataaccagccgaaatttaaaagcgtggcgaaactgaccagcccgaaacgcgtgaccagcctgtttagccgc

SEQ ID NO: 206 - protein, 436 aa, Arabidopsis thaliana
MYCSSSMHPNANKENISTSDVQESFVRITRSRAKKAMGRGVSIPPTKPSFKQQKRRAVLKDVSNTSADIIYSELRKGGNIKANRKCLKEPKKAAKEGANSAMDILVDMHTEKSKLAEDLSKIRMAEAQDVSLSNFKDEEITEQQEDGSGVMELLQVVDIDSNVEDPQCCSLYAADIYDNIHVAELQQRPLANYMELVQRDIDPDMRKILIDWLVEVSDDYKLVPDTLYLTVNLIDRFLSNSYIERQRLQLLGVSCMLIASKYEELSAPGVEEFCFITANTYTRPEVLSMEIQILNFVHFRLSVPTTKTFLRRFIKAAQASYKVPFIELEYLANYLAELTLVEYSFLRFLPSLIAASAVFLARWTLDQTDHPWNPTLQHYTRYEVAELKNTVLAMEDLQLNTSGCTLAATREKYNQPKFKSVAKLTSPKRVTSLFSR

SEQ ID NO: 207 - DNA, 1116 bp, Arabidopsis thaliana
  source 1..1116: mol_type = unassigned DNA
atgaccgaacaggaaatttgcgtgcgcgtgacccgcgcggcggcgaaacgcaaagcgagcaccgcgatgggcattgatggcgatcgcgtgaacaaaaaacgcgtggtgctgggcgaactgctgaacgtgagcaacgtgaacctgctggcgaacctgaaccagaaaaaagaaacccagaaaccgaaacgcaacctgaaaccgccgccggcgaaacagattaaaagcgcgccggtggcgattattgatctggaaagcaaaagcgatattgatagccgcagcgatgatccgcagatgtgcggcccgtatgtggcggatatttatgaatatctgcgccagctggaagtgaaaccgaaacagcgcccgctgccggattatattgaaaaagtgcagaaagatgtgaccccgagcatgcgcggcgtgctggtggattggctggtggaagtggcggaagaatataaactgggcagcgaaaccctgtatctgaccgtgagccatattgatcgctttctgagcctgaaaaccgtgaacaaacagaaactgcagctggtgggcgtgagcgcgatgctgattgcgagcaaatatgaagaaattagcccgccgaaagtggatgatttttgctatattaccgataacacctttagcaaacaggatgtggtgaaaatggaagcggatattctgctggcgctgcagtttgaactgggccgcccgaccattaacacctttatgcgccgctttacccgcgtggcgcaggatgattttaaagtgccgcatctgcagctggaaccgctgtgctgctatctgagcgaactgagcattctggattataaaaccgtgaaatttgtgccgagcctgctggcggcgagcgcggtgtttctggcgcgctttattattcgcccgaaacagcatccgtggaaccagatgctggaagaatataccaaatataaagcggcggatctgcaggtgtgcgtgggcattattcatgatctgtatctgagccgccgcggcggcgcgctgcaggcggtgcgcgaaaaatataaacatcataaatttcagtgcgtggcgaccatgccggtgagcccggaactgccggtgaccttttgggaagatgtgaccatt

SEQ ID NO: 208 - protein, 372 aa, Arabidopsis thaliana
MTEQEICVRVTRAAAKRKASTAMGIDGDRVNKKRVVLGELLNVSNVNLLANLNQKKETQKPKRNLKPPPAKQIKSAPVAIIDLESKSDIDSRSDDPQMCGPYVADIYEYLRQLEVKPKQRPLPDYIEKVQKDVTPSMRGVLVDWLVEVAEEYKLGSETLYLTVSHIDRFLSLKTVNKQKLQLVGVSAMLIASKYEEISPPKVDDFCYITDNTFSKQDVVKMEADILLALQFELGRPTINTFMRRFTRVAQDDFKVPHLQLEPLCCYLSELSILDYKTVKFVPSLLAASAVFLARFIIRPKQHPWNQMLEEYTKYKAADLQVCVGIIHDLYLSRRGGALQAVREKYKHHKFQCVATMPVSPELPVTFWEDVTI

SEQ ID NO: 209 - DNA, 981 bp, Arabidopsis thaliana
  source 1..981: mol_type = unassigned DNA
atggtgagcaaaaaagataaacagattcatagcgatcataacccgcaggatgcgagcccggtggaatgggcggaaattcgccataaactgctggcgtttcaggaaaacattcagagcggcagcgatattgatgcgcgcagcgatgatccgcagatgtgcggcctgtatgtgagcgatatttatgaatatctgcgcgaactggaagtgaaaccgaaactgcgcccgctgcatgattatattgaaaaaattcaggaagatattaccccgagcaaacgcggcgtgctggtggattggctggtggaagtggcggaagaatttgaactggtgagcgaaaccctgtatctgaccgtgagctatattgatcgctttctgagcctgaaaatggtgaacgaacattggctgcagctggtgggcgtgagcgcgatgtttattgcgagcaaatatgaagaaaaacgccgcccgaaagtggaagatttttgctatattaccgcgaacacctataccaaacaggatgtgctgaaaatggaagaagatattctgctggcgctggaatttgaactgggccgcccgaccaccaacacctttctgcgccgctttattcgcgtggcgcaggaagattttaaagtgccgaacctgcagctggaaccgctgtgctgctatctgagcgaactgagcatgctggattatagctgcgtgaaatttgtgccgagcctgctggcggcgagcgcggtgtttctggcgcgctttattattctgccgaaccagcatccgtggagccagatgctggaagaatgcaccaaatataaagcggcggatctgcaggtgtgcgtggaaattatgctggatctgtatctgagccgcagcgaaggcgcgagcaaagcggtgcgcgaaaaatataaacagcataaatttcagtatgtggcggcgattccggtgtatcaggaactgccggtgaccttttgggaagatgtggtgaccatt

SEQ ID NO: 210 - protein, 327 aa, Arabidopsis thaliana
MVSKKDKQIHSDHNPQDASPVEWAEIRHKLLAFQENIQSGSDIDARSDDPQMCGLYVSDIYEYLRELEVKPKLRPLHDYIEKIQEDITPSKRGVLVDWLVEVAEEFELVSETLYLTVSYIDRFLSLKMVNEHWLQLVGVSAMFIASKYEEKRRPKVEDFCYITANTYTKQDVLKMEEDILLALEFELGRPTTNTFLRRFIRVAQEDFKVPNLQLEPLCCYLSELSMLDYSCVKFVPSLLAASAVFLARFIILPNQHPWSQMLEECTKYKAADLQVCVEIMLDLYLSRSEGASKAVREKYKQHKFQYVAAIPVYQELPVTFWEDVVTI

SEQ ID NO: 211 - DNA, 1110 bp, Arabidopsis thaliana
  source 1..1110: mol_type = unassigned DNA
atggcggaaaaccagaactgcgcgcgcatgacccgcgcggcggcgaaacgcaaagcgagcagcatggcgctggatgaaaacccggtgagcaaaaaacgcgtggtgctgggcgaactgccgaacatgagcaacgtggtggcggtgccgaaccaggaacgcgaaaccctgaaagcgaaaaccagcgtgaacaccagcaaacgccagatgaaaaaagcgctgatgattccggaagcgagcgtgctgattgaaagccgcagcgtggatccgcagatgtgcgaaccgtttgcgagcgatatttgcgcgtatctgcgcgaaatggaaggcaaaccgaaacatcgcccgctgccggattatattgaaaaagtgcagagcgatctgaccccgcatatgcgcgcggtgctggtggattggctggtggaagtggcggaagaatataaactggtgagcgataccctgtatctgaccattagctatgtggatcgctttctgagcgtgaaaccgattaaccgccagaaactgcagctggtgggcgtgagcgcgatgctgattgcgagccgcaaatatgaagaaattggcccgccgaaagtggaagatttttgctatattaccgataacacctttaccaaacaggaagtggtgagcatggaagcggatattctgctggcgctgcagtttgaactgggcagcccgaccattaaaacctttctgcgccgctttacccgcgtggcgcaggaagattttaaagatagccagctgcagattgaatttctgtgctgctatctgagcgaactgagcatgctggattatacctgcgtgaaatatctgccgagcctgctgagcgcgagcgcggtgtttctggcgcgctttattattcgcccgaaacagcatccgtggaaccagatgctggaagaatataccaaatataaagcggcggatctgcaggtgtgcgtgggcattattcatgatctgtatctgagccgccgcggcaacaccctggaagcggtgcgcaacaaatataaacagcataaatataaatgcgtggcgaccatgccggtgagcccggaactgccgctggcgttttttgaagatattaccattcgcggcatggcg

SEQ ID NO: 212 - protein, 370 aa, Arabidopsis thaliana
MAENQNCARMTRAAAKRKASSMALDENPVSKKRVVLGELPNMSNVVAVPNQERETLKAKTSVNTSKRQMKKALMIPEASVLIESRSVDPQMCEPFASDICAYLREMEGKPKHRPLPDYIEKVQSDLTPHMRAVLVDWLVEVAEEYKLVSDTLYLTISYVDRFLSVKPINRQKLQLVGVSAMLIASRKYEEIGPPKVEDFCYITDNTFTKQEVVSMEADILLALQFELGSPTIKTFLRRFTRVAQEDFKDSQLQIEFLCCYLSELSMLDYTCVKYLPSLLSASAVFLARFIIRPKQHPWNQMLEEYTKYKAADLQVCVGIIHDLYLSRRGNTLEAVRNKYKQHKYKCVATMPVSPELPLAFFEDITIRGMA

SEQ ID NO: 213 - DNA, 1188 bp, Arabidopsis thaliana
  source 1..1188: mol_type = unassigned DNA
atgctgcgcgatggcaacaaacagagcaaaaacaacgtgcgctttgtgcgcaaaagcattaaaaccaccgtgaaaaccagcctgcagaaccgcagcagcctgaaaaaaccgccggtgggccgcagcaaaagccgcagcattagcagcattccgagcagcgcggtggcgagcaccctgagcctgccggaaaaagtggaaaccaaatgcctggaagaagatacccagggcgaaagcagcagcagcggcaacaaagatccgaccaccaaagtgctggatgtgaccgcgaaaccgaaaagcaaacgccgcaaaagctttaccagcctgctggtgaacggcagcaaatttgatgaaaaaaacggcgaaaccaccgaaccggaaaaactgccgagcattgatgatgaaagcaaccagctggaagtggcggaatatgtggatgatatttatcagttttattggaccgcggaagcgctgaacccggcgctgggccattatctgagcgcgcatgcggaagtgagcccggtgacccgcggcattctgattaactggctgattgaagtgcattttaaatttgatctgatgcatgaaaccctgtatctgaccatggatctgctggatcgctatctgagccaggtgccgattcataaaaacgaaatgcagctgattggcctgaccgcgctgctgctggcgagcaaatatgaagattattggcatccgcgcattaaagatctgattagcattagcgcggaaagctatacccgcgaacagattctgggcatggaacgcagcatgctgaaacagctgaaatttcgcctgaacgcgccgaccccgtatgtgtttatgctgcgctttctgaaagcggcgcagagcaacaaaaaactggaacagctggcgttttatctgattgaactgtgcctggtggaatatgaagcgctgaaatataaaccgagcctgctgtgcgcgagcgcgatttatgtggcgcgctgcaccctgcatatgaccccggtgtggaccagcctgctgaacaaccatacccattataacgtgagccagatgaaagattgcagcgatatgattctgcgctttcataaagcggcgaaaaccggcaacctgcgcgtgacctatgaaaaatatattaacccggatcgcagcaacgtggcggtgctgaaaccgctggataaactgccgctg

SEQ ID NO: 214 - protein, 396 aa, Arabidopsis thaliana
MLRDGNKQSKNNVRFVRKSIKTTVKTSLQNRSSLKKPPVGRSKSRSISSIPSSAVASTLSLPEKVETKCLEEDTQGESSSSGNKDPTTKVLDVTAKPKSKRRKSFTSLLVNGSKFDEKNGETTEPEKLPSIDDESNQLEVAEYVDDIYQFYWTAEALNPALGHYLSAHAEVSPVTRGILINWLIEVHFKFDLMHETLYLTMDLLDRYLSQVPIHKNEMQLIGLTALLLASKYEDYWHPRIKDLISISAESYTREQILGMERSMLKQLKFRLNAPTPYVFMLRFLKAAQSNKKLEQLAFYLIELCLVEYEALKYKPSLLCASAIYVARCTLHMTPVWTSLLNNHTHYNVSQMKDCSDMILRFHKAAKTGNLRVTYEKYINPDRSNVAVLKPLDKLPL

SEQ ID NO: 215 - DNA, 1734 bp, Arabidopsis thaliana
  source 1..1734: mol_type = unassigned DNA
atgaaagaaattgcgatgcgcaacagcaaacgcaaaccggaaccgaccccgtttgcgggcaaaaaactgcgcagcacccgcctgcgccgcaaacgcgcgcagattagcccggtgctggtgcagagcccgctgtggagcaaacagattggcgtgagcgcggcgagcgtggatagctgcagcgatctgctggcggatgataacgtgagctgcggcagcagccgcgtggaaaaaagcagcaacccgaaaaaaaccctgattgaagaagtggaagtgagcaaaccgggctataacgtgaaagaaaccattggcgatagcaaatttcgccgcattacccgcagctatagcaaactgcataaagaaaaagaaggcgatgaaattgaagtgagcgaaagcagctgcgtggatagcaacagcggcgcgggcctgcgccgcctgaacgtgaaaggcaacaaaattaacgataacgatgaaattagctttagccgcagcgatgtgacctttgcgggccatgtgagcaacagccgcagcctgaactttgaaagcgaaaacaaagaaagcgatgtggtgagcgtgattagcggcgtggaatattgcagcaaatttggcagcgtgaccggcggcgcggataacgaagaaattgaaattagcaaaccgagcagctttgtggaagcggatagcagcctgggcagcgcgaaagaactgaaaccggaactggaaattgtgggctgcgtgagcgatctggcgtgcagcgaaaaatttagcgaagaagtgagcgatagcctggatgatgaaagcagcgaacagcgcagcgaaatttatagccagtatagcgattttgattatagcgattataccccgagcattttttttgatagcggcagcgaatttagcgaaaaaagcagcagcgatagcccgattagccatagccgcagcctgtatctgcagtttaaagaacagttttgccgcagcaccattccgaacgattttggcagcagctgcgaagaagaaattcatagcgaactgctgcgctttgatgatgaagaagtggaagaaagctatctgcgcctgcgcgaacgcgaacgcagccatgcgtatatgcgcgattgcgcgaaagcgtattgcagccgcatggataacaccggcctgattccgcgcctgcgcagcattatggtgcagtggattgtgaaacagtgcagcgatatgggcctgcagcaggaaaccctgtttctgggcgtgggcctgctggatcgctttctgagcaaaggcagctttaaaagcgaacgcaccctgattctggtgggcattgcgagcctgaccctggcgacccgcattgaagaaaaccagccgtataacagcattcgcaaacgcaactttaccattcagaacctgcgctatagccgccatgaagtggtggcgatggaatggctggtgcaggaagtgctgaactttaaatgctttaccccgaccatttttaactttctgtggttttatctgaaagcggcgcgcgcgaacccggaagtggaacgcaaagcgaaaagcctggcggtgaccagcctgagcgatcagacccagctgtgcttttggccgagcaccgtggcggcggcgctggtggtgctggcgtgcattgaacataacaaaattagcgcgtatcagcgcgtgattaaagtgcatgtgcgcaccaccgataacgaactgccggaatgcgtgaaaagcctggattggctgctgggccag

SEQ ID NO: 216 - protein, 578 aa, Arabidopsis thaliana
MKEIAMRNSKRKPEPTPFAGKKLRSTRLRRKRAQISPVLVQSPLWSKQIGVSAASVDSCSDLLADDNVSCGSSRVEKSSNPKKTLIEEVEVSKPGYNVKETIGDSKFRRITRSYSKLHKEKEGDEIEVSESSCVDSNSGAGLRRLNVKGNKINDNDEISFSRSDVTFAGHVSNSRSLNFESENKESDVVSVISGVEYCSKFGSVTGGADNEEIEISKPSSFVEADSSLGSAKELKPELEIVGCVSDLACSEKFSEEVSDSLDDESSEQRSEIYSQYSDFDYSDYTPSIFFDSGSEFSEKSSSDSPISHSRSLYLQFKEQFCRSTIPNDFGSSCEEEIHSELLRFDDEEVEESYLRLRERERSHAYMRDCAKAYCSRMDNTGLIPRLRSIMVQWIVKQCSDMGLQQETLFLGVGLLDRFLSKGSFKSERTLILVGIASLTLATRIEENQPYNSIRKRNFTIQNLRYSRHEVVAMEWLVQEVLNFKCFTPTIFNFLWFYLKAARANPEVERKAKSLAVTSLSDQTQLCFWPSTVAAALVVLACIEHNKISAYQRVIKVHVRTTDNELPECVKSLDWLLGQ

SEQ ID NO: 217 - DNA, 3177 bp, Arabidopsis thaliana
  source 1..3177: mol_type = unassigned DNA
atgatgaccctgcagatggataaaaccaccgcgagcagcagctgggaacgcgcgaaaagcatttatgatgaaattgcggaactggcgaacaaacgccagaaagcgggcaacccgccggatccgaacctgctgcagctgctgcgcgaaaaatatgaagcgattattctggaaagccatacctttagcgaacagcataacattgaaattccgctgtggcagctgcattataaacgcattgaatattttcgcctgcatattaaccgcgtgctggcgagcagcaccagcaccgcggcgcagaacgtgaaaggcccgagcaaagcggaacagattgcgcagctgaaactgcagtttcgcacctttctgagcgaagcgaccggcttttatcatgatatgattctgaaaattcgcagcaaatatggcctgccgctgggcagctttagcgaagatcagcagagccagaacctgagcgataaagatggcaaagaactggcggaagtgcagaaagcgctgaaaagctgccatcgctgcctgatttatctgggcgatctggcgcgctataaaggcatgtatgcggaaggcgatagccgcagccgccagtatgcgagcgcgagcagctattatctgcaggcggcgagcctgtggccggcgagcggcaacccgcatcatcagctggcgattgtggcgagctatagccgcgatgaatttgtgaccacctatcgctattttcgcagcctggcggtggaatatccgtttccgaccgcgcgcgataacctgattgtggcgtttgataaaaaccgccagagctatgaaaaactgtttgtgccgagcaaagatagcagcaaacgcctgaccggcaaaggccgcggcaaaggcgcggatattagcctgaaagatgcgaccctggtggcgggcccggaaaaagataaagtgaccattgcgaacgaaatgctgaaagcgtttagcattcgctttgtgcatctgaacggcattctgtttacccgcaccagcctggaaaccttttttgatgtgctggcgagcaccagcagcagcctgcgcgaagtgattagcctgggcagcgcgaaagaactgaccctgggcattgataccagcgatagcgcgctgtttattgtgcgcgtggtgaccatgctgatttttagcgtgcataacagcaaaaaagaaaccgaaggccagagctatgcggaaattgtgcagcgcgtggaaccggcgcgcaacagcctgaccgcgagctttgaactgctgggcctggtgattgaaaaatgcgtgcagctgggcgatccgagcagcagctattttctgccgggcgtgctggtgtttgtggaatggctggcgtgctgcccggatattgcgctgggcagcgatccggatgatcgccagaccgcggtgcgcaacagcttttggaaccagtttgtggtgttttttaaccaggtgctgagcctgggcccgacctttattgatgatgtggaagatgaaacctgctttagcaacatgagcctgtatgatgaacgcgaaaccgaaaaccgcctggcgctgtgggaagattatgaactgcgcggctttctgccgctgctgccggcgcagaccattctgaactttagccgcaaacatagctttggcaccgaaggcccgaaagaaaaaaaagcgcgcattaaacgcatttttgcggcgggcaaagcgctgaccagcgtgattaaagtggatcagaaccatgtgtattttgatagcaaaaaaaaaaaatttctggtgggcgtgaaaccggcggatgattttctggatagccatagcagcccgccgaaagcgtgcaacgcgctgcaggataaccaggtgatgattgatcataacagcccgattatgcagctggatcagcagatttatatgggcgaagaagatgatgatgatgaagtgattgtgtttaaaccgctggtgaccgaaaaacgcaaagaagcgagcgatcagatttatgtgccgagcggcggctttcgcaaaagcgatcaggtgaccaccatgggcgattttaaagcgctgagcggcagcgatgtggcgtttcatgaaaaccagattctgcaggcgcgcggcaacgcgagcattcaggtgccggcgagcgtgggcgcgaacctgctgggcccgctgcagccgagcacccagagccaggcgatgcatatgcagcaggtgcagacccaggtgcaggtgccggcgagcgtgggcgcgaacctgctgggcctgctgctgaccagcacccagagccaggcgatgcatatgcagcaggtgcagacccaggcggtgaacccgcagccggcgcagagcctggcggcgagccgcctgcagccgattcagagccaggtggcgcagccgctgccgagccgcgtggtgcattttcagcagacccaggcgcaggtgagccatgtgagcccggcgcatagccagagcaccagctttggcggcggcagcaaatggagcccggaagaagcggcgagcctggcgagcagcctgagcggctttgcgcagctgggcaacggccatgtgatgcgcaacgaaatgcagggcaaccatggcgtgagctattatccggcgcatagcctgccggtgcatcagagctataacggcaacggcatgggcggcatgccgtatagccagagccgcaccccggaagcggtgtttccgccgaaaattgatccggtgctgagcagcggcgtggtggcggatggcctgggcgtgcagagcagcctggcgaaaaaaaacccgattagccgcgcgtttcgccatctgggcccgccgccgggctttaacagcgtgccggcgaaactgcagaaagaaccggcgccgggcagcgaactgagcggcaacaaccatctgccggtggatgattatagctggctggatggctatcaggcgcagagcagccgcggcgtgggcctgaacagcagcctgaactatgcgaccagcggcaaaccggaacatctgggcagcaccggcaacggcctgaacggcccggcgaactttccgtttccgggcaaacaggtgccgaccagccaggtgcaggcggattttccgtattttcagaacccgcagaaagataactttgtggataaaaaccatcagagcacccagctgccggaacagtatcagggccagagcacctggagcagccgccattttgtg

SEQ ID NO: 218 - protein, 1059 aa, Arabidopsis thaliana
MMTLQMDKTTASSSWERAKSIYDEIAELANKRQKAGNPPDPNLLQLLREKYEAIILESHTFSEQHNIEIPLWQLHYKRIEYFRLHINRVLASSTSTAAQNVKGPSKAEQIAQLKLQFRTFLSEATGFYHDMILKIRSKYGLPLGSFSEDQQSQNLSDKDGKELAEVQKALKSCHRCLIYLGDLARYKGMYAEGDSRSRQYASASSYYLQAASLWPASGNPHHQLAIVASYSRDEFVTTYRYFRSLAVEYPFPTARDNLIVAFDKNRQSYEKLFVPSKDSSKRLTGKGRGKGADISLKDATLVAGPEKDKVTIANEMLKAFSIRFVHLNGILFTRTSLETFFDVLASTSSSLREVISLGSAKELTLGIDTSDSALFIVRVVTMLIFSVHNSKKETEGQSYAEIVQRVEPARNSLTASFELLGLVIEKCVQLGDPSSSYFLPGVLVFVEWLACCPDIALGSDPDDRQTAVRNSFWNQFVVFFNQVLSLGPTFIDDVEDETCFSNMSLYDERETENRLALWEDYELRGFLPLLPAQTILNFSRKHSFGTEGPKEKKARIKRIFAAGKALTSVIKVDQNHVYFDSKKKKFLVGVKPADDFLDSHSSPPKACNALQDNQVMIDHNSPIMQLDQQIYMGEEDDDDEVIVFKPLVTEKRKEASDQIYVPSGGFRKSDQVTTMGDFKALSGSDVAFHENQILQARGNASIQVPASVGANLLGPLQPSTQSQAMHMQQVQTQVQVPASVGANLLGLLLTSTQSQAMHMQQVQTQAVNPQPAQSLAASRLQPIQSQVAQPLPSRVVHFQQTQAQVSHVSPAHSQSTSFGGGSKWSPEEAASLASSLSGFAQLGNGHVMRNEMQGNHGVSYYPAHSLPVHQSYNGNGMGGMPYSQSRTPEAVFPPKIDPVLSSGVVADGLGVQSSLAKKNPISRAFRHLGPPPGFNSVPAKLQKEPAPGSELSGNNHLPVDDYSWLDGYQAQSSRGVGLNSSLNYATSGKPEHLGSTGNGLNGPANFPFPGKQVPTSQVQADFPYFQNPQKDNFVDKNHQSTQLPEQYQGQSTWSSRHFV

SEQ ID NO: 219 - DNA, 1326 bp, Arabidopsis thaliana
  source 1..1326: mol_type = unassigned DNA
atgagcagcagcagccgcaacctgagccaggaaaacccgattccgcgcccgaacctggcgaaaacccgcaccagcctgcgcgatgtgggcaaccgccgcgcgccgctgggcgatattaccaaccagaaaaacggcagccgcaacccgagcccgagcagcaccctggtgaactgcagcaacaaaattggccagagcaaaaaagcgccgaaaccggcgctgagccgcaactggaacctgggcattctggatagcggcctgccgccgaaaccgaacgcgaaaagcaacattattgtgccgtatgaagataccgaactgctgcagagcgatgatagcctgctgtgcagcagcccggcgctgagcctggatgcgagcccgacccagagcgatccgagcattagcacccatgatagcctgaccaaccatgtggtggattatatggtggaaagcaccaccgatgatggcaacgatgatgatgatgatgaaattgtgaacattgatagcgatctgatggatccgcagctgtgcgcgagctttgcgtgcgatatttatgaacatctgcgcgtgagcgaagtgaacaaacgcccggcgctggattatatggaacgcacccagagcagcattaacgcgagcatgcgcagcattctgattgattggctggtggaagtggcggaagaatatcgcctgagcccggaaaccctgtatctggcggtgaactatgtggatcgctatctgaccggcaacgcgattaacaaacagaacctgcagctgctgggcgtgacctgcatgatgattgcggcgaaatatgaagaagtgtgcgtgccgcaggtggaagatttttgctatattaccgataacacctatctgcgcaacgaactgctggaaatggaaagcagcgtgctgaactatctgaaatttgaactgaccaccccgaccgcgaaatgctttctgcgccgctttctgcgcgcggcgcagggccgcaaagaagtgccgagcctgctgagcgaatgcctggcgtgctatctgaccgaactgagcctgctggattatgcgatgctgcgctatgcgccgagcctggtggcggcgagcgcggtgtttctggcgcagtataccctgcatccgagccgcaaaccgtggaacgcgaccctggaacattataccagctatcgcgcgaaacatatggaagcgtgcgtgaaaaacctgctgcagctgtgcaacgaaaaactgagcagcgatgtggtggcgattcgcaaaaaatatagccagcataaatataaatttgcggcgaaaaaactgtgcccgaccagcctgccgcaggaactgtttctg

SEQ ID NO: 220 - protein, 442 aa, Arabidopsis thaliana
MSSSSRNLSQENPIPRPNLAKTRTSLRDVGNRRAPLGDITNQKNGSRNPSPSSTLVNCSNKIGQSKKAPKPALSRNWNLGILDSGLPPKPNAKSNIIVPYEDTELLQSDDSLLCSSPALSLDASPTQSDPSISTHDSLTNHVVDYMVESTTDDGNDDDDDEIVNIDSDLMDPQLCASFACDIYEHLRVSEVNKRPALDYMERTQSSINASMRSILIDWLVEVAEEYRLSPETLYLAVNYVDRYLTGNAINKQNLQLLGVTCMMIAAKYEEVCVPQVEDFCYITDNTYLRNELLEMESSVLNYLKFELTTPTAKCFLRRFLRAAQGRKEVPSLLSECLACYLTELSLLDYAMLRYAPSLVAASAVFLAQYTLHPSRKPWNATLEHYTSYRAKHMEACVKNLLQLCNEKLSSDVVAIRKKYSQHKYKFAAKKLCPTSLPQELFL

SEQ ID NO: 221 - DNA, 1302 bp, Arabidopsis thaliana
  source 1..1302: mol_type = unassigned DNA
atgtgcccgtgcgtggaacgccgcgcgccgccgggcgtgtattataccccgccgccggcgcgcaccagcgatcatgtggcggcgatgccgatgaccgaacgccgccgcccgccgtatagctgcagcagcagcagcgaacgccgcgatccgtttcatattgtgcataaagtgccgagcggcgatagcccgtatgtgcgcgcgaaacatgcgcagctgattgataaagatccgaaccgcgcgattagcctgttttggaccgcgattaacgcgggcgatcgcgtggatagcgcgctgaaagatatggcggtggtgatgaaacagctgggccgcagcgatgaaggcattgaagcgattaaaagctttcgctatctgtgcagctttgaaagccaggatagcattgataacctgctgctggaactgtataaaaaaagcggccgcattgaagaagaagcggtgctgctggaacataaactgcagaccctggaacagggcatgggctttggcggccgcgtgagccgcgcgaaacgcgtgcagggcaaacatgtgattatgaccattgaacaggaaaaagcgcgcattctgggcaacctgggctgggtgcatctgcagctgcataactatggcattgcggaacagcattatcgccgcgcgctgggcctggaacgcgataaaaacaaactgtgcaacctggcgatttgcctgatgcgcatgagccgcattccggaagcgaaaagcctgctggatgatgtgcgcgatagcccggcggaaagcgaatgcggcgatgaaccgtttgcgaaaagctatgatcgcgcggtggaaatgctggcggaaattgaaagcaaaaaaccggaagcggatctgagcgaaaaattttatgcgggctgcagctttgtgaaccgcatgaaagaaaacattgcgccgggcaccgcgaacaaaaactatagcgatgtgagcagcagcccggcgagcgtgcgcccgaacagcgcgggcctgtatacccagccgcgccgctgccgcctgtttgaagaagaaacccgcggcgcggcgcgcaaactgctgtttggcaaaccgcagccgtttggcagcgaacagatgaaaattctggaacgcggcgaagaagaaccgatgaaacgcaaaaaactggatcagaacatgattcagtatctgcatgaatttgtgaaagataccgcggatggcccgaaaagcgaaagcaaaaaaagctgggcggatattgcggaagaagaagaagcggaagaagaagaagaagaacgcctgcagggcgaactgaaaaccgcggaaatg

SEQ ID NO: 222 - protein, 434 aa, Arabidopsis thaliana
MCPCVERRAPPGVYYTPPPARTSDHVAAMPMTERRRPPYSCSSSSERRDPFHIVHKVPSGDSPYVRAKHAQLIDKDPNRAISLFWTAINAGDRVDSALKDMAVVMKQLGRSDEGIEAIKSFRYLCSFESQDSIDNLLLELYKKSGRIEEEAVLLEHKLQTLEQGMGFGGRVSRAKRVQGKHVIMTIEQEKARILGNLGWVHLQLHNYGIAEQHYRRALGLERDKNKLCNLAICLMRMSRIPEAKSLLDDVRDSPAESECGDEPFAKSYDRAVEMLAEIESKKPEADLSEKFYAGCSFVNRMKENIAPGTANKNYSDVSSSPASVRPNSAGLYTQPRRCRLFEEETRGAARKLLFGKPQPFGSEQMKILERGEEEPMKRKKLDQNMIQYLHEFVKDTADGPKSESKKSWADIAEEEEAEEEEEERLQGELKTAEM

SEQ ID NO: 223 - DNA, 729 bp, Arabidopsis thaliana
  source 1..729: mol_type = unassigned DNA
atgccggaagcgcgcgatcgcaccgaacgcccggtggattatagcaccatttttgcgaaccgccgccgccatggcattctgctggatgaaccggatagccgcctgagcctgattgaaagcccggtgaacccggatattggcagcattggcggcaccggcggcctggtgcgcggcaactttaccacctggcgcccgggcaacggccgcggcggccataccccgtttcgcctgccgcagggccgcgaaaacatgccgattgtgaccgcgcgccgcggccgcggcggcggcctgctgccgagctggtatccgcgcaccccgctgcgcgatattacccatattgtgcgcgcgattgaacgccgccgcggcgcgggcaccggcggcgatgatggccgcgtgattgaaattccgacccatcgccaggtgggcgtgctggaaagcccggtgccgctgagcggcgaacataaatgcagcatggtgaccccgggcccgagcgtgggctttaaacgcagctgcccgccgagcaccgcgaaagtgcagaaaatgctgctggatattaccaaagaaattgcggaagaagaagcgggctttattaccccggaaaaaaaactgctgaacagcattgataaagtggaaaaaattgtgatggcggaaattcagaaactgaaaagcaccccgcaggcgaaacgcgaagaacgcgaaaaacgcgtgcgcaccctgatgaccatgcgc

SEQ ID NO: 224 - protein, 243 aa, Arabidopsis thaliana
MPEARDRTERPVDYSTIFANRRRHGILLDEPDSRLSLIESPVNPDIGSIGGTGGLVRGNFTTWRPGNGRGGHTPFRLPQGRENMPIVTARRGRGGGLLPSWYPRTPLRDITHIVRAIERRRGAGTGGDDGRVIEIPTHRQVGVLESPVPLSGEHKCSMVTPGPSVGFKRSCPPSTAKVQKMLLDITKEIAEEEAGFITPEKKLLNSIDKVEKIVMAEIQKLKSTPQAKREEREKRVRTLMTMR

SEQ ID NO: 225 - DNA, 1482 bp, Zea mays
  source 1..1482: mol_type = unassigned DNA
atggctatgcgaaaagaaaaccctgtgcttaatgcttgtcaagcatccaatggccggatcacgcgagctcaagctgctgcaaatcgtcgaagctttggaactttcccttctgttccattgcctgcaaaaaccgaacgaaaacagactgcacaagggaaggcaaaacgaggttcttcatatgacaacaccagtgcaagtgttgcactttcaggcccccagcctaaaaggcgcacagtactcagggatgtgaccaatttgagcaatgctaactctaacaaaagttttgctgctgcaccgaagcttcagacaaagccctctctaaggactggaagaaccgtgagcaaaagcaagccgtgcgcaaaaaagattcctaaaaaaccaccaccagctggtaatggaagtgcattgactaatgttttgaacattgctgaagaaacacaagcggagaagattttggcagagagagtggaacccgttctgttgcttgagaacagggggccactttcattgcagaatgttgaaaggaacagggacagtgcttgtcatgaggtattctttgaggaaagaaacctcagggataaatgtgaaccttctgtgtcaaagaatggggactcttatgtgttagacattgtagatatcgacaaagataatggcaatcctcaaatgtgtgcttcctacgttgtggagatatactcaaacctaatggcttcagagcttatgagaagaccaagtccaaattacatggagggtttgcaacgggacatcacaaagggcatgagagaaatactcattgattggcttgtggaggtttctgaagaatacaagcttgttccagacacgctgtacctaactgtatatcttattgaccggtttctttctcggaactacattgaaagacagagactacaacttgtgggaataacaagcatgcttgttgcctcgaaatatgaagagatatgtgctcctcgagtagaagagttctgtttcataaccgacaatacatacacaaaagcagaggtgctgaaaatggagagccagctgctgaatgacctgggatttaacctttctgttccaactacaaaaacatttctcaggagattccttagagcggcacaagcatctcgtaaaactccttctatgactttaggatttctggccaattatctcgcggagttgactttgaccgaatatgagttcttgaaatttcttccgtcgttggtggcagcatcggccgtgtttcttgctagatggacgcttgaccaatccgacctcccatggaaccagactctagagcactacacctcttacaaatgctctgacattcaattgtgtgtctgtgctctacgggaactccagcataacaccagtaactgccctcttaacgccatccgcgagaagtacaggcatcaaaaggtaatctttatgttggaaaaactcgtacaacattgcttaagcgaagttttcagttacacactttggtag

SEQ ID NO: 226 - protein, 493 aa, Zea mays
MAMRKENPVLNACQASNGRITRAQAAANRRSFGTFPSVPLPAKTERKQTAQGKAKRGSSYDNTSASVALSGPQPKRRTVLRDVTNLSNANSNKSFAAAPKLQTKPSLRTGRTVSKSKPCAKKIPKKPPPAGNGSALTNVLNIAEETQAEKILAERVEPVLLLENRGPLSLQNVERNRDSACHEVFFEERNLRDKCEPSVSKNGDSYVLDIVDIDKDNGNPQMCASYVVEIYSNLMASELMRRPSPNYMEGLQRDITKGMREILIDWLVEVSEEYKLVPDTLYLTVYLIDRFLSRNYIERQRLQLVGITSMLVASKYEEICAPRVEEFCFITDNTYTKAEVLKMESQLLNDLGFNLSVPTTKTFLRRFLRAAQASRKTPSMTLGFLANYLAELTLTEYEFLKFLPSLVAASAVFLARWTLDQSDLPWNQTLEHYTSYKCSDIQLCVCALRELQHNTSNCPLNAIREKYRHQKVIFMLEKLVQHCLSEVFSYTLW

SEQ ID NO: 227 - DNA, 1458 bp, Zea mays
  source 1..1458: mol_type = unassigned DNA
atggctgcaagaaagaaaaagcctttgcttattgcttgccaagcaaccagtgccagaataacaagatctcaggctgctgcaaatagtacaagatctgggctggctccttctgtaccagtacctctgaaaacggagcataaccatgcagcgaaaaaaaagatgaaaagggaagcttcagatgaaaatgcttctgctgatgctggagcttcagctcctctgcctaaaaggcgtacagttctcaagaatgtaactaacataagctgtgctaaaatttccaaaaggtgcactgctgtgactgggctgaagttgggtccctcccagaaggctgggcagagcataaacaagcaatgcacaaacaagatctccatgcttctccctctggctgttggagggagttcacttgtggatgattctaataatgctgaagaaacacaaatggtagaccttttggcacagaaagagaagcagattgttttgcttaaggaggctcagccattacagaatactgaacaaaacaaaggcggtgcttgtgatgaggcatctgttgaggaaagaaatgccatgaatgtacacgaaactgctgccttaaaggctggggtctctaatggtttaaacattgtagatattgacaaaaataatggtgatcctcaaatgtgtgttacctacgttgcagagatatacagaaatctaatggcctcagagcttataagaagacctaggtcaaattacatggagactttgcaacaggacatcacagctagcatgcgaggtgttctaattgattggcttgttgaggtttcggacgaatataagcttgtggcagatacactttaccttacagtatatcttattgaccaatttctttctcagaactgtatccaaacgcacaagctgcaacttcttgggataactagtatgctgattgcctcgaaatatgaagagtattctgctcctagtgctgaagaattttgtaacataacggctggtacatatgcaaaggctgaggttctggaaatggagcaacaagtgcttaatgatctgggctttcatttatctgttccaacaacaaacacatttctcaggagattccttagagcagcacaggcttctcgtacagctcatctgaccactttgaattatctggcgagttatcttgccgagttgactttaatcagttacgatttcatgaaatttcttccctcagaggtggcagcatcttcgattttccttgcaaaatggacacttgaccaatctgaccatccttggaaccctactcttgagcactacacgtcttacaaaagcttcgatattagaacttgcgtgcgggctctacaggaactgcagcacaacaccagtaattgccccctcaacgccatccgtgagaagtatgggcagcagaagttcgagtgcgttgccaacctcaggtcaccggagctgctgcggtcgctcttcagttga

SEQ ID NO: 228 - protein, 485 aa, Zea mays
MAARKKKPLLIACQATSARITRSQAAANSTRSGLAPSVPVPLKTEHNHAAKKKMKREASDENASADAGASAPLPKRRTVLKNVTNISCAKISKRCTAVTGLKLGPSQKAGQSINKQCTNKISMLLPLAVGGSSLVDDSNNAEETQMVDLLAQKEKQIVLLKEAQPLQNTEQNKGGACDEASVEERNAMNVHETAALKAGVSNGLNIVDIDKNNGDPQMCVTYVAEIYRNLMASELIRRPRSNYMETLQQDITASMRGVLIDWLVEVSDEYKLVADTLYLTVYLIDQFLSQNCIQTHKLQLLGITSMLIASKYEEYSAPSAEEFCNITAGTYAKAEVLEMEQQVLNDLGFHLSVPTTNTFLRRFLRAAQASRTAHLTTLNYLASYLAELTLISYDFMKFLPSEVAASSIFLAKWTLDQSDHPWNPTLEHYTSYKSFDIRTCVRALQELQHNTSNCPLNAIREKYGQQKFECVANLRSPELLRSLFS

SEQ ID NO: 229 - DNA, 1584 bp, Zea mays
  source 1..1584: mol_type = unassigned DNA
atgtcgacccacgccgcctcccgccgctcctcctcctcgtccgcggtcgccaagcgccccgcgatagcggagggagctaccaaggcggcgggaccgggccccaccgccgcgcaggcgaagaagcgcaccgcgctcgtcaacatcaccaacgtcgccgctccgggggcgagggtcgccgccgttgggaaggtcgcgccaccggtcaccggcgcgtacctgattagtggaggttccaggcagaggtttgaaataacttgtcccttttgttcaaattcaaatctcatgcagaagttgaatccagctacctcaggtgcacccttaaagaagccatctttggcaaatgctcgcaccatccggggttctgctgcgaagtcggcttccatcaagccagctccaccagtatcacgccatgacagcagctcagagcagaagcataatgttcttgtgcctaccactgtccatgtgccaagtcgtgctcctgccttggtaccctacagcagtttcgtgtctcctggacgttcaagagattcagtttctactgatgagacgatgtcgacttgtgactccatgaaaagcccggacttcgagtacatagacaatgggggttgctcgatgctggcttcgttgcagcgacgggcggatgaacatctgcgtacatcagaggacagagacgttgaagaaaataagtggaagaaaaatggccctgccccaatggaaatcgacagcatctgtgaagttgacagtaacctcgaggatccacagttgtgcgccgctctggcttctgacatctacatgcatctgcgagaagctgagatgaagaaaagaccatcgactgatttcatgaagacgattcaaaaggatgtcaaccctagcatgagggcaattttgatagactggctcgtggaagttgctgaagaatatcgtcttgctcctgataccttgtacctgacagtcaactacatcgaccgttatctttctggcaacgagatcaatcgccaaaggctgcaattacttggtgttgcttgcatgcttatagcggcaaaatacgaggagatatgtgcaccccaggttgaagaattctgctacataacagacaatacatacttcagagacgaggttctagaaatggaagcttctgtgctgaactacttgaagtttgaaatgacagcgcctacggcaaagtgtttcttgaggagatttgctcgttctgcacaggcgtgtgatgaggatcctgctctgcatctggagttcctggccaattacatcgctgagctatccctgctggagtacagtcttctgtcttaccctccatcactaatcgctgcctcagctattttcttggcgagatttgtactccagccaacgaagtatccttggaactccacgcttgctcactacacgcagtacaagccgtccgaattgagcgagtgtgtaaagacactgcaccgcctttccagtgttggtcctgggagcaacctcccagcaatcagagaaaagtacagccagcacaaatacaaatttgtcgcgaagaagcagtgcccgccacaaatccctgccgaattcttcagggatgcggcatgctag

SEQ ID NO: 230 - protein, 527 aa, Zea mays
MSTHAASRRSSSSSAVAKRPAIAEGATKAAGPGPTAAQAKKRTALVNITNVAAPGARVAAVGKVAPPVTGAYLISGGSRQRFEITCPFCSNSNLMQKLNPATSGAPLKKPSLANARTIRGSAAKSASIKPAPPVSRHDSSSEQKHNVLVPTTVHVPSRAPALVPYSSFVSPGRSRDSVSTDETMSTCDSMKSPDFEYIDNGGCSMLASLQRRADEHLRTSEDRDVEENKWKKNGPAPMEIDSICEVDSNLEDPQLCAALASDIYMHLREAEMKKRPSTDFMKTIQKDVNPSMRAILIDWLVEVAEEYRLAPDTLYLTVNYIDRYLSGNEINRQRLQLLGVACMLIAAKYEEICAPQVEEFCYITDNTYFRDEVLEMEASVLNYLKFEMTAPTAKCFLRRFARSAQACDEDPALHLEFLANYIAELSLLEYSLLSYPPSLIAASAIFLARFVLQPTKYPWNSTLAHYTQYKPSELSECVKTLHRLSSVGPGSNLPAIREKYSQHKYKFVAKKQCPPQIPAEFFRDAAC

SEQ ID NO: 231 - DNA, 1119 bp, Zea mays
  source 1..1119: mol_type = unassigned DNA
atggagaactctgccgccgccgccgccgaacggccgcgcctcacccgcgcagccgccaagcgctcagccgtcgtcacggctgtggccgtcgccgccaagcgcaagcgcgtcgcgctcagccagctgcccacgctccccaacgccgtgctcggcgcgcacgacgacgacgacgacaagcccgtcaggaagcagcgcctcctccccgccgccaagcccaagcccaagcccaaggcagcgcccgcgcctgccgcgcccgccgccgcggatgacacggatgacgacattcagctctgcaagccctacgcttccgacatctactcctacctccgctccatggagtcgcaggccaagcgccgcctcgctgttgactacatcgcggcggtgcagatcgacgtcacgcccaacatgcgtggcatcctcatcgactggctcgtcgaggtcgccgaggagtacaagctcgtctccgacacgctctacctcaccgtctcctacatcgaccgcttcctctctgccaaagttctcaacaggcagaagctgcagctcctcggcgtctccgccatgctcatcgcatccaagtatgaggagatcagcccgcccaacgtggaggatttctgctacatcaccgataacacctacaccaagcaggaggtagttaagatggagagtgatatactgaatgtcctcaagtttgaggtgggcagtcctaccgccaagacgttcctgaggatgttcatcagatctgcccaagaagacaacaagaagtatcctagcctccagttggagttcctggggagctacctttctgagctgagcttgctggattatggcttgattcgctccttgccgtcacttgttgcagcctcagccgtctttgttgcaaggctgaccctggatccacacacccatccctggagcaagaaggtgcaaacgctaacaggctataagccatctgagttgaaggactgtgttgctgccatacataatttgcagctcaaccggacatgtcaatccatggtggcgatccgggagaaatacaggcaacaccgattcaagggtgtatcagctttgctacctcctgttgagatccctgcatcatacttcaatacactgaaggagtag

SEQ ID NO: 232 - protein, 372 aa, Zea mays
MENSAAAAAERPRLTRAAAKRSAVVTAVAVAAKRKRVALSQLPTLPNAVLGAHDDDDDKPVRKQRLLPAAKPKPKPKAAPAPAAPAAADDTDDDIQLCKPYASDIYSYLRSMESQAKRRLAVDYIAAVQIDVTPNMRGILIDWLVEVAEEYKLVSDTLYLTVSYIDRFLSAKVLNRQKLQLLGVSAMLIASKYEEISPPNVEDFCYITDNTYTKQEVVKMESDILNVLKFEVGSPTAKTFLRMFIRSAQEDNKKYPSLQLEFLGSYLSELSLLDYGLIRSLPSLVAASAVFVARLTLDPHTHPWSKKVQTLTGYKPSELKDCVAAIHNLQLNRTCQSMVAIREKYRQHRFKGVSALLPPVEIPASYFNTLKE

SEQ ID NO: 233 - DNA, 1272 bp, Zea mays
  source 1..1272: mol_type = unassigned DNA
atgggggacaaggagaacgcacctcccttgggggcccggggcgcggcggcgccccggctcacgcgggccgcggccaagcgagctgcggcggcggcggcggcggcggagggtccgggcgacgccaagcggcggcgggtggcgctcggggagctcccggcgctcgccaacaacgccggcctccgcgcgccgtcctgccccgtcaagccctcgaagcctgcgtccaggcccgggaggcacgcgaggaatgttgcgccggaggcccgcgggccctcctccgcccacgaggccgagcgctgcgcgtcctccccgccgcgcaccgccgacgccgacgccgagtctaactccgtctccaaccccgcgccgcgcgccaccgcctacgccgactcctgcgcttcctcctcgccgccgcgcgccgccgccgccggggcgcccgccgacccccagctctgcgggtcctacgcctccgacatctacacctacctccgctccctggaggtggagccgcagcggcggtccagacccgattacatcgaggcggtgcaggcggacgttacggcgcacatgcgcggcatcctcgtcgactggctggtcgaggtcgccgaggagtataagctcgtcgccgacaccctgtacctcgccatctcctatgtggatcgcttcctctccgtcaatgcgctcggccgcgacaagctgcagctccttggcgtcgcctccatgctcattgctgcgaagtatgaggagatcagcccgccgcacccggaggacttttgctacatcacagacaacacctacaccaaagaggagctcctcaagatggagagcgatatactcaagcttctcaagttcgagttgggcaatcctaccattaagaccttcctgaggcggttcacaagatctgcccatgaagacaagaagcgctccatcttgttaatggaattcttggggagctacctggctgagttgagtctactggattatggctgtctccgattcttgccatcagtagttgctgcttcagttatgttcgttgctaggctgaccattgatccaaatgccaatccttggaacatgaagctgcagaagacgacaggctacaaagtttctgaactcaaggattgcatcgtagccatacgtgacttgcagctcaacaggaaatttccatcattaacggcaattcgagacaagtacaagcaacacaagttcaaatgtgtgtcaacgcttcttccccctgttgtggtccctacttcatactttgaagacttagctgagtag

SEQ ID NO: 234 - protein, 423 aa, Zea mays
MGDKENAPPLGARGAAAPRLTRAAAKRAAAAAAAAEGPGDAKRRRVALGELPALANNAGLRAPSCPVKPSKPASRPGRHARNVAPEARGPSSAHEAERCASSPPRTADADAESNSVSNPAPRATAYADSCASSSPPRAAAAGAPADPQLCGSYASDIYTYLRSLEVEPQRRSRPDYIEAVQADVTAHMRGILVDWLVEVAEEYKLVADTLYLAISYVDRFLSVNALGRDKLQLLGVASMLIAAKYEEISPPHPEDFCYITDNTYTKEELLKMESDILKLLKFELGNPTIKTFLRRFTRSAHEDKKRSILLMEFLGSYLAELSLLDYGCLRFLPSVVAASVMFVARLTIDPNANPWNMKLQKTTGYKVSELKDCIVAIRDLQLNRKFPSLTAIRDKYKQHKFKCVSTLLPPVVVPTSYFEDLAE

SEQ ID NO: 235 - DNA, 1425 bp, Zea mays
  source 1..1425: mol_type = unassigned DNA
atggcgggcaaggagaacgcagctcccgtgggggccctgggcgtggcggggccccggctcacgcgggccgcggcgaagcgcgcggcggcgatggcggcggagggtccggacgacgccaaacggaggcgggtggcgcttggggagctcccggcgctcgccaacaacgccgccctcgcaccgtctcgccccgtgaagccctcgaagcccgcgtccaggcccgcgaggcccggcgcgtcggaggcctgcgggcccgccgccgccgccgaggccgagcgctgcgcgtccttctccccgccgcgcgccgccgacgccgagtccaactccgcctcctactccccgccgcgcaccacagccgacaccgctttctccgcgccgccgcgcgccgccgacgccgagtccaactccgcctcctactccccgccgctcgccacagccgacaccgctttctccgcgccgccgcgcgccgtggcgcccgccgacctccagctctccgggtcctacgcctccgacatctacacctacctccgctccctggaggtactccgctccgctccccaatctttcgcatttccgcagattcgatgcatctgcgttgggtctcgtctgatccgatgcttgcttgctacggatttggtgcggcgggtgcaggtggatccgcagcggcggtccagatccgattacatcgaggcggtgcaggcggacgtcacggcccacatgcggagcatcctcgtcgactggctcgtcgaggtcgccgaggagtacaagctcgtcgcggacacgctctacctcaccatctcttatgtcgaccgcttcctctccgtcaacgcgctcggccgtgacaagctgcagctccttggcgttgcctccatgctcattgccgcgaagttcgaggagatcagcccgccgcacccggaggacttctgctacatcacagacaacacctacaccaaagaggagctcctcaagatggagagcgacatactcaagcttctcaagttcgagttgggcaatcctacaatcaagaccttcctgagacgtttcataagatctgcccatgaagacaagaagggctccatcttgttaatggaattcttggggagctacctcgctgagctgagtctactagattatggctgcctccggttcttgccatcagtagttgctgcttcagtcatgtttgttgctaggctgaccattgatccaaataccaatccgtggaacacaaagctgcagaagatgactggctacaaagtttctgaactcaaggattgcatcgtagccatacatgacttgcagctcaacaggaaatgtccatcattaacggcaattcgagacaagtacaagcagcacaagttcaaatgcgtgtcattgatcctcgtgcctgtcgtgatccctacttcatactttgaagacttagctgagtag

SEQ ID NO: 236 - protein, 474 aa, Zea mays
MAGKENAAPVGALGVAGPRLTRAAAKRAAAMAAEGPDDAKRRRVALGELPALANNAALAPSRPVKPSKPASRPARPGASEACGPAAAAEAERCASFSPPRAADAESNSASYSPPRTTADTAFSAPPRAADAESNSASYSPPLATADTAFSAPPRAVAPADLQLSGSYASDIYTYLRSLEVLRSAPQSFAFPQIRCICVGSRLIRCLLATDLVRRVQVDPQRRSRSDYIEAVQADVTAHMRSILVDWLVEVAEEYKLVADTLYLTISYVDRFLSVNALGRDKLQLLGVASMLIAAKFEEISPPHPEDFCYITDNTYTKEELLKMESDILKLLKFELGNPTIKTFLRRFIRSAHEDKKGSILLMEFLGSYLAELSLLDYGCLRFLPSVVAASVMFVARLTIDPNTNPWNTKLQKMTGYKVSELKDCIVAIHDLQLNRKCPSLTAIRDKYKQHKFKCVSLILVPVVIPTSYFEDLAE

SEQ ID NO: 237 - DNA, 1074 bp, Zea mays
  source 1..1074: mol_type = unassigned DNA
atggccgacatgcaaaactacgccgccccgccgctcctcacccacgctaccgccaagcgcaagcgtgtcgccctcaaccagctgcccacgctccccaacgccgtgctcggcgcgcacgacgaaggcggcggcggcgatgacaagcccgtcaagaagcagcacctcctccccgccgccaagcccgagcccaatgcagctcccgcgcctgccgccgccgcctctgatgtcgaggaggacccgcagctccgcaagccctacgcgtccgacatctactcctacctccgctccacggagtcgcaggccacgcgccgccccgccacggattacatcgcggcggtgcaggtcgacgtcacgcccaacacgcgggccatcctcgtcgactggctcgtcgatgtctccgaggagtacagattcgtctccgacacgctctacctcaccgtctcctacatcgaccgcttcctctccgccaacgcactcaacaggcagaagctgcagctcctcggcgtcgccgccatgctcatcgcatccaagcacgaggagatcagcccgctcaatgtggaggatttctgctacatcaccgataacacctacaccaagcaggaggtagttaagatggagagcgatatactgaatgtcctcaagtttgagatgggaaatcctactccaaaaacgttcctgaggatgttcaccagatttagcaaagaagacaccaagaagtatcgtagcctccagctggagttcctgggtagctacctttgtgagctcagcttgctagactacagcttgcttcgcttcttgccgtcacttgttgcagcctcggtgctgtttgttgcaaggctgacccttgatccacacacccatccctggagcaagaagatgcagacactaactggctacaagccatttgagttgaaggactgtgttgctgccatacatcatttgcagctcaaccggaaatattcatccatgatggcgacccgggataaattcaaggaacgcaggtttaagggtgtatcagctttgctaccacctgttgagatcccagcgtcatacttcgagaaactgaaggagtag

SEQ ID NO: 238 - protein, 357 aa, Zea mays
MADMQNYAAPPLLTHATAKRKRVALNQLPTLPNAVLGAHDEGGGGDDKPVKKQHLLPAAKPEPNAAPAPAAAASDVEEDPQLRKPYASDIYSYLRSTESQATRRPATDYIAAVQVDVTPNTRAILVDWLVDVSEEYRFVSDTLYLTVSYIDRFLSANALNRQKLQLLGVAAMLIASKHEEISPLNVEDFCYITDNTYTKQEVVKMESDILNVLKFEMGNPTPKTFLRMFTRFSKEDTKKYRSLQLEFLGSYLCELSLLDYSLLRFLPSLVAASVLFVARLTLDPHTHPWSKKMQTLTGYKPFELKDCVAAIHHLQLNRKYSSMMATRDKFKERRFKGVSALLPPVEIPASYFEKLKE

SEQ ID NO: 239 - DNA, 1275 bp, Zea mays
  source 1..1275: mol_type = unassigned DNA
atggcggcgcgggcggctgacgagaacaggagaccggcggcagggaagcccgcgccaggcgtccgagacatggcgagccggcgcgcgctcacggacatcaagaacctcgtcggggctgccccgtacccctacgccgtcgccaagaagcccatgctgcagaagagcaaaagggacgaaaagcagccagcgttggcaagcagccggcccatgacaaggaaattcgccgcctccttggcgagcaagggccaacctgaatgtcagccgatcgtagctgatccagaacccgaagtttgtcaacagaaggaatcagtaggcgatggcaccgttgatattgacgtggaactctacgagctggtcgacggtagtgatagtgacatcgacatgggtgcgacagagaacaaggacattatgaacgaagatgaattgctcatggatattgacagtgcagactcggggaacccgcttgctgcaacagaatatgttaaagagctttacaccttttacagagaaaatgaggctaagagttgtgtaaggccagattacatgtccagccaacaagacataaactcaaagatgagagcaattctgattgactggctgattgaggttcactacaagtttgaactgatggatgagacgctctttcttatggtaaacataatagatagattcttggaaaaggaagtggttccaaggaagaagctacaactggttggagtcacagctatgctgctcgcttgtaaatatgaggaggtatctgttccagttgttgaggaccttgtgctgatatctgaccgtgcctacacaaaagggcaaattttagaaatggaaaagttgattctgaacacgctgcagttcaacatgtctgttccaacaccttatgtcttcatgaagaggtttctgaaagctgcagatgcagataaacagcttgagctagcgtcatttttcatgctggagctctgcttggtagaataccaaatgctgaattatcggccttcgcatctggctgctgctgcggtttatactgcacagtgtgctatcaatcgttgccagcactggacaaaggtctgcgagtctcatagcagatacactagcgaccaactcctggagtgctcgaggatgatggtagattttcaccagaaggctggaaccagtaagctcactggcgtgcacaggaagtacagtacctacaagttcggttgcgtggccaagattttgcctgcgcagttcctgctggagtcgggagggacaccgcctccttcaggtgcaaactag

SEQ ID NO: 240 - protein, 424 aa, Zea mays
MAARAADENRRPAAGKPAPGVRDMASRRALTDIKNLVGAAPYPYAVAKKPMLQKSKRDEKQPALASSRPMTRKFAASLASKGQPECQPIVADPEPEVCQQKESVGDGTVDIDVELYELVDGSDSDIDMGATENKDIMNEDELLMDIDSADSGNPLAATEYVKELYTFYRENEAKSCVRPDYMSSQQDINSKMRAILIDWLIEVHYKFELMDETLFLMVNIIDRFLEKEVVPRKKLQLVGVTAMLLACKYEEVSVPVVEDLVLISDRAYTKGQILEMEKLILNTLQFNMSVPTPYVFMKRFLKAADADKQLELASFFMLELCLVEYQMLNYRPSHLAAAAVYTAQCAINRCQHWTKVCESHSRYTSDQLLECSRMMVDFHQKAGTSKLTGVHRKYSTYKFGCVAKILPAQFLLESGGTPPPSGAN

SEQ ID NO: 241 - DNA, 1440 bp, Zea mays
  source 1..1440: mol_type = unassigned DNA
atggagtgcgcaagggagttgcgggttcgctccacgtttacggcggcggccatggcgtccaagaagcaggtggggcctggaggcgcggttcccgctcaggaacagatgaacggcggcgatgccgccagactggtcaggaagccaatggatacatttccacagccagcggcggcaagaggccgtagggcacttgtcgacgttggcaatcttatgaatggccggccttctcttgtgaaccatcagaagcaagcggttgcggcagcggcaaccagtcataaaccactcaacgtcggcaacaagaagccacttgttcctcaggcagcagcaagaggcctgcgaccccttgccgacgttacgaatcttatgatcaaagaccgtgctgctcctgcaaatcgtcagaagcctgtggatgctgtgtttaacaggaacgggaaggcagtaaagctgaaggaatgcaaggtgaagcctgaagtcattgtgatcattccagattccgagaaggagaagaaaggcaaattccctggaggtcagagagtctgtaggagggtgccaacactttttgacaatttgacaaaatgcagcagggcctctgatgggattaccaccccgaagaagaaggatccatatgacattgatgcacctgattcttgcaatgagctggcagtcgttgaatatgttgaggacatttacagattctacaagagcactgagggcacctgccttcctctcagcagctacatgagctcacaggctgaaatcagtgagagaatgagagctatccttatcgactggattatcgaggtacagtacaggcttactctaatgccagagacactttacttgaccgtctacatcatcgaccagtacttatccatggagagtgtaccaagaaaggagctacagctcgtcggcataagtgccatgctgatagcaagcaagtacgaagagatatgggctccactggttaaggacttgatgtgcctctgtgacaacgcatttaccagagaccagattctgaccaaggaaaaggccatcctggacatgctccattggaacctgacggttccaacaatgtacatgttcattgttaggtacctgaaagccgcaatgtgtgacacagagcttgagaacatgacattcttctactccgagctggcattggtccagtacgcgatgctggtttaccctccatcggtgaccgcagccgctgccgtctatgctgccaggtctacacttgggatgaatccacagtggactgatattctggaacatcacactggcctagctgagccacagttactggactgcgctaggcggctgatcagcttccatgccctggctccggaaagcaagcaaaaggcggtgtacaggaaatactccaagcccaagctcggctccgtcgcgcttcaatcccctgacaagaagcttttgtcaggttga

SEQ ID NO: 242 - protein, 479 aa, Zea mays
MECARELRVRSTFTAAAMASKKQVGPGGAVPAQEQMNGGDAARLVRKPMDTFPQPAAARGRRALVDVGNLMNGRPSLVNHQKQAVAAAATSHKPLNVGNKKPLVPQAAARGLRPLADVTNLMIKDRAAPANRQKPVDAVFNRNGKAVKLKECKVKPEVIVIIPDSEKEKKGKFPGGQRVCRRVPTLFDNLTKCSRASDGITTPKKKDPYDIDAPDSCNELAVVEYVEDIYRFYKSTEGTCLPLSSYMSSQAEISERMRAILIDWIIEVQYRLTLMPETLYLTVYIIDQYLSMESVPRKELQLVGISAMLIASKYEEIWAPLVKDLMCLCDNAFTRDQILTKEKAILDMLHWNLTVPTMYMFIVRYLKAAMCDTELENMTFFYSELALVQYAMLVYPPSVTAAAAVYAARSTLGMNPQWTDILEHHTGLAEPQLLDCARRLISFHALAPESKQKAVYRKYSKPKLGSVALQSPDKKLLSG

SEQ ID NO: 243 - DNA, 1308 bp, Zea mays
  source 1..1308: mol_type = unassigned DNA
atgcgtccgagacatggggagccggcgcgcgctcacggacatcaagaacctcgtcggggttgccccgaacccctgcgccgtcgccaagaagcccgtgctgcagaagagcagaagggacgaaaagaagacagcgttgccaagcagccggccgatgacaaggttaggacgcgtgctagctgttcttgcgctctggcatttcttggaggctttgatttgatctgggtattgctttggttgctcaggaaattcgtcgcctccttggcgagcaaagggcaacctgaatgtcagccgaccggagctgatccagaacccggagttgatcaacggaaggaaccaatcggcgatggcatcattgatatcgacgtggaactggacgagccggtcgacgatagtgattgtgacgtcgacatgggtgatgagacagagaacaaggacattatgaaccaagatgaatcgctcatggatattgatagtgcagactcggggaacccgcttgcagcaacagaatatgttgaagagctttacaagttttacagagaaaatgaggctaagagttgtgtaaaccctgattacatgtccagtcagcaagatataaatgcaaagatgagagcaattctgattgactggctgattgaggttcactacaagtttgaactgatggacgagacgctatttcttacggtaaacgtaatagatagattcttggaaaaggaagtggttccaaggaagaagctacaactggttggaatcacagctctgcttcttgcttgcaaatatgaggaggtctcagttccagttgttgaggaccttgtgctcatttctgaccgtgcctacacaaaagggcaaattctagaaatggaaaagttgattctgaacacgctgcaattcaacatgtctgttccaacaccttatgtcttcatgaagaggtttctgaaagcagcagacgcagataaacagcttgagctagtgtcatttttcatgctggagctctgcttggtagagtaccaaatgctgaattataggccttcacatctggctgccgctgcggtttatactgcacaatgtgctattaaccgttgccagcagtggacaaaggtttgcgagtcacatagcagatacactggcgaccaactcctggagtgctcgaggatgatggtagactttcaccagaaggctggaaccggcaagctcactggcgtgcacaggaagtacagtacctacaagttcgggtgcgcggccaagattttgcccgcgcagttcatgctggagttaggagggacagcaccgcctccttcaggtgcaatctaa

SEQ ID NO: 244 - protein, 435 aa, Zea mays
MRPRHGEPARAHGHQEPRRGCPEPLRRRQEARAAEEQKGRKEDSVAKQPADDKVRTRASCSCALAFLGGFDLIWVLLWLLRKFVASLASKGQPECQPTGADPEPGVDQRKEPIGDGIIDIDVELDEPVDDSDCDVDMGDETENKDIMNQDESLMDIDSADSGNPLAATEYVEELYKFYRENEAKSCVNPDYMSSQQDINAKMRAILIDWLIEVHYKFELMDETLFLTVNVIDRFLEKEVVPRKKLQLVGITALLLACKYEEVSVPVVEDLVLISDRAYTKGQILEMEKLILNTLQFNMSVPTPYVFMKRFLKAADADKQLELVSFFMLELCLVEYQMLNYRPSHLAAAAVYTAQCAINRCQQWTKVCESHSRYTGDQLLECSRMMVDFHQKAGTGKLTGVHRKYSTYKFGCAAKILPAQFMLELGGTAPPPSGAI

SEQ ID NO: 245 - DNA, 1371 bp, Zea mays
  source 1..1371: mol_type = unassigned DNA
atgcctcccgccatgctcgcgccggtgcccaccaggccgcgctccaaccccttccgccgccgcagaggagctgctccgcgcctcctcgatcagactgcgacggctgcggcgaagcggcccgctgagtcgtccacctcggcttcctcctgcttctacagcgaggtgatctccaactccacctccctcgccgcgtttcagcacccagagaagaggcgtcggcgccaggacgcggacgcggacgaggcgcggccggccggctccgagtgctcggaggtgatcggcggcgcgagggtgcgccccgcagaggtcgaggcctccgagtcgtcgtgcctcggctccgtgctcgagtccgacctcgcctgccctgagcagctcgccgacaacgctgaggcgatcgagtactcctccgcgtgcgatgagctgaccccgtcggagcccgatgaggaggaggtgctcagcggttccagcggctgcgcgctgtactccctcagccccctgatcagctccccattgaccgaagatgacaacgacgacgcgccctctgcgacattctccctcttcctcgacttcgccaagcagttcgtcccctgcgtgcaccccaaaacgtgcgccgtcaccagtaccgctctcgatctcctgacggggaggcggtttgaggacttagacgacgaggagacctacgagcggttccggcggcgcgagcggcgtgaggcagttgcgcgcgactacactgaggtgtacaggtccatacccgacagctacggccctctcgtcgtggagcaacgtgtcttcatggtggactggatcattgagcattcacgtctgatgaagctccagccagttacaatgttcatggggattggattgatggaccgcttcttgacacaagggtatatgaaaggtttggaaaaccttcagttgctggccattgcctgcatcaccctggctacccgcatcgaagagaaccagccatacaattgcgtccttcaaaagacttttaaatttgggaccattaacacctacagccagagtgaagttgttgccatggagtggctggttcaggaggtcctcaacttcaagtgttttgtcacaacacctcaccatttcctatggttctatctgaaggctgcaaatgctgatgacagtgtagcggacctggcaaaccacctggccttcctctcacttgagaaccctaagcagctctccttctggccctcgactgtggcagctgcagtggtagctcttgcttgccttgccacaggcaaggagccctcatgccatttggtgatggagactcacatgaggacgcaggacgatgatctaccagaatgcctaatgagcctcgagtggctgatcgagtgcgtcccgtga

SEQ ID NO: 246 - protein, 456 aa, Zea mays
MPPAMLAPVPTRPRSNPFRRRRGAAPRLLDQTATAAAKRPAESSTSASSCFYSEVISNSTSLAAFQHPEKRRRRQDADADEARPAGSECSEVIGGARVRPAEVEASESSCLGSVLESDLACPEQLADNAEAIEYSSACDELTPSEPDEEEVLSGSSGCALYSLSPLISSPLTEDDNDDAPSATFSLFLDFAKQFVPCVHPKTCAVTSTALDLLTGRRFEDLDDEETYERFRRRERREAVARDYTEVYRSIPDSYGPLVVEQRVFMVDWIIEHSRLMKLQPVTMFMGIGLMDRFLTQGYMKGLENLQLLAIACITLATRIEENQPYNCVLQKTFKFGTINTYSQSEVVAMEWLVQEVLNFKCFVTTPHHFLWFYLKAANADDSVADLANHLAFLSLENPKQLSFWPSTVAAAVVALACLATGKEPSCHLVMETHMRTQDDDLPECLMSLEWLIECVP

SEQ ID NO: 247 - DNA, 1380 bp, Zea mays
  source 1..1380: mol_type = unassigned DNA
atgcctcccaccatgctcgcgccggtgcccaccaggccgcgctccaaccccttccgccggcgcagaggagctgctccgctgcttctcgatcagacttcggcgaagcggcccgctgagtcgtccacctcagcctcatcctgcttctacagtgaggtgatctccaactcctccacatccctcgccccgtatcagcgcctggagaagaggcatcgacgccaggacacagacgcgggcgaggcgcggccggctggctccgagtgctcggaggtgatcggcggcgcgagggtgcgccccgccgaggtcgaggtctccgaatcgtcctgccctgtctccgtgctcgagtccgacctcgcctgcccgaagcagctcgccgacgacgctgaggcgatcgagaaatcctccgcgtgcgatgagctgaccccgtcgtcggagcccgatgaggaggaggtgctcagtgatcccagccactcggggtactcccccagtcccctgatcagctccccattgaccgaagatgacagcgacgacgcgccctctgcgaccttctccctctttctcgacttcgccaagcagttcgtcccctgcttgcaccccaaaccgtgcaccgtcaccagttccactctcgatctcctgacggggaggcggtttgaggacttggacgacgaggagagctacgagcgcttccggcggcgcgagcgacgcgaggcagttgcgcgcgacttcactgaggtgtgcagctccacctccatacccgacagctaccgccctctcgtcgtggagcaacgtgtcatcatggtgaactggatcatccagcattcacgtctgatgaagctccagccagttacaatgttcatgggaattggattgatggaccgcttcttgacacaagggtatatgaagggtttgagaaaccttcagttgttgggcattgcctgcatcaccttggctacacgcatcgaagagaaccagtcatacaattgcgttcttcgaaagacttttcaagttgggatcaatatctacagccagagtgaggttgttgccatggagtggctggttcaggaggtcctcaacttcaagtgttttgtcacaacaacccatcatttcctatggttctatctgaaggctgcaaatgctgatgacagggtagcggacctggcaaactacctggccttcatctcacttcggaaccatgagcagctctccttctggccctcgactgtggcagctgcagtggtagttcttgcttgccttgccacaaacaaggagtcctcatgccatttggtgacggaggtgaacacccagactcacatcaggacgcaggatgatgatctaccagaatgcctaatgagcctcgagtggctgatcaagtacgtctcgtga

SEQ ID NO: 248 - protein, 459 aa, Zea mays
MPPTMLAPVPTRPRSNPFRRRRGAAPLLLDQTSAKRPAESSTSASSCFYSEVISNSSTSLAPYQRLEKRHRRQDTDAGEARPAGSECSEVIGGARVRPAEVEVSESSCPVSVLESDLACPKQLADDAEAIEKSSACDELTPSSEPDEEEVLSDPSHSGYSPSPLISSPLTEDDSDDAPSATFSLFLDFAKQFVPCLHPKPCTVTSSTLDLLTGRRFEDLDDEESYERFRRRERREAVARDFTEVCSSTSIPDSYRPLVVEQRVIMVNWIIQHSRLMKLQPVTMFMGIGLMDRFLTQGYMKGLRNLQLLGIACITLATRIEENQSYNCVLRKTFQVGINIYSQSEVVAMEWLVQEVLNFKCFVTTTHHFLWFYLKAANADDRVADLANYLAFISLRNHEQLSFWPSTVAAAVVVLACLATNKESSCHLVTEVNTQTHIRTQDDDLPECLMSLEWLIKYVS

SEQ ID NO: 249 - DNA, 3150 bp, Zea mays
  source 1..3150: mol_type = unassigned DNA
atgatgactgttcccatggatagtgctagcgcagccccatcctccacgcgggaccttgccgagcgtctccttactaggaataatgaacttgaagaccagcttcgtaagtccgcacaatccaaagtcccatcagatcccaacatatggcttcagatgcgtgacaactttgagaagataattctcatagatcacgacctctctgaacagagagatgtagagtatctcctatggcagttgcattacaaaagaattgaggacttcaggaggaacattagtgcagctagctcacttgcatctcagagtgggaagagcaacactaacccagatcgagtcaagagaattaaatcagccttcaaaagcttcctttcagaagcaactggcttctatcatgacttgatgttaaagatcaaatcaaattggggccttccactcaattactttccagacagccttgacaatgcaaacaactctgtgcgagatgacatgaaaacagttcaattgaagaaaggtttgatttcatgccatcggtgtctgatatatttgggagatcttgctcgttacaagagtttgaatggtgatggtgattctgctagtcgtgaatacacagcggcttctagttactacaaggaggcagcttctatctatccttccagtggcaaccctcatcatcagcttgctatactagcttcttactccggcaacgaggtggtggctgtttataggtacttccgaagcttagctgcagacactccttttgccactgcacgggacaacttgattattctttttgaaaagaatcgccaaagctatggacagctgccagacaacagcaaagttcctagcactaagacattacccccacggccatctgggtggggccgaggacggggagaagtaaggtttcaaccaaaagatgttaatgcagaaacagctgaaagggaacgcgagtgcaataatggtgatacattgaagaccttctatataagattcgtcaggctcaatggaattcttttcacgaggaccagtttggaaacattcggggagctgttttcttcagttagcaatgatttgcagattcttctttcttctggtcttgaagaggaccttaatttcggttctgatgctgcagaaaatgcattggctgctgttagacttactgtcatccttatattcacagtgcacaatgtaaataaagagcctgataggcagtcttatgctgaaattgtgcaacgcagagtactgctccaaagtgcgtttacggctgcttttgactttgttggacgaattctcagaaggtgttcagagctccatgatattgcatcaagcttctatctgccagccattttggtctatattgaatggctggcgtcccatccagagttggctgttgattcagagatggaggaaaagcatgcaaatgccaggtctttcttctggagccaatgcatctcatttatgaataagttgatccttaccaaccttgcatctgtgaatgatgatgatgacgaggcttgcttttctaatatgagcatttatgaggagggtgaaactggcaacaggtttgccctttgggaagatcttgaattgagaggttttctgcccttgcttcctgcacataccattttggatttctcaagcaaacacacatttggaagcaccaaggagaagaaagcacgggttcagcgaatttttgctgcaggaaagtcactgcttaactttgttcagattgatcagttgagaatttattttgattcatcatcgaagaagtttgttatggccaagaaccctcctgtttctaaaactaacacccctcttcacgaatctcctgatgcacttaaaacaagtggcactgaaatggattatgaggctgctagaagatttgattcagtttcttctaatatgggcacactgcagtctaaagtgcagttttgtcctgatggtgacgatgatgaagaaattgttttcaagccaacagcttccgaaaagtttccgaaagctccttcagatctgttggttaatggatacactcatcctgtacctatgtctactgctggctggccaaccaatgctagtttagtgcctgttcagagcactggatcaatgactgcaactggttggccacccaatggtgggtcaaatgcttttccaagtactgcatctctatcagctgctggtaattacaacattaaccagtcgcttcccaggtcttccgttggttgggctgtcaatggtgagcaaagtgttattcctagcattgctccaagatttgaactcgtgcagcctgttgaagagcctgtttccagctggacaagcagtggtgcacagcatgttggtactcagcacaagcacacaggtttaactttcccagatgttgtgtctgaaccacttgtatctgcatcaatggttcaacgtttcagtagcactgattattcgaaatttctcagtgaacaagaaatgctcttagtgaatggactgaatactgtcaacttaactggaaatggctatttaaagcagagactgcagcctggattgagtggtttacagtctatggggtattcatctcagacacctattgaacctggtggtaccactgcaaactcgatgcataatcatctgaaaattactggagagaatgtgccctctacacttgattcagttgtaccttcaatagctccattaggtggcatgccaatgaaattcacagaagcgccactaactgcttcaaagaagaaccctgttagtcgtccatcaaagcctgttgggccacctccaggatttgatcatgtagccccaaagcgccaagatgattctattccagttgaaaaactgcagatcccacaggttgatgattacagctggctagatggttatcagcaatcgattgatcatgttcacaacttaagaactgtttattctggtgtcagtgacagcactgcatttgccactccattccccttccctgggaaacaacagttatctgggatgcatgcacaaggggctacaaatgaaaagacatggcaagatttccgtctttttgagccttcaaaacagaacatgctccaaaattaccaccaaagaaatcagcaaaatggtcaaatagctgaacaagagccagcaaattctgtctggtctagcagttaccatgtgtga

SEQ ID NO: 250 - protein, 1049 aa, Zea mays
MMTVPMDSASAAPSSTRDLAERLLTRNNELEDQLRKSAQSKVPSDPNIWLQMRDNFEKIILIDHDLSEQRDVEYLLWQLHYKRIEDFRRNISAASSLASQSGKSNTNPDRVKRIKSAFKSFLSEATGFYHDLMLKIKSNWGLPLNYFPDSLDNANNSVRDDMKTVQLKKGLISCHRCLIYLGDLARYKSLNGDGDSASREYTAASSYYKEAASIYPSSGNPHHQLAILASYSGNEVVAVYRYFRSLAADTPFATARDNLIILFEKNRQSYGQLPDNSKVPSTKTLPPRPSGWGRGRGEVRFQPKDVNAETAERERECNNGDTLKTFYIRFVRLNGILFTRTSLETFGELFSSVSNDLQILLSSGLEEDLNFGSDAAENALAAVRLTVILIFTVHNVNKEPDRQSYAEIVQRRVLLQSAFTAAFDFVGRILRRCSELHDIASSFYLPAILVYIEWLASHPELAVDSEMEEKHANARSFFWSQCISFMNKLILTNLASVNDDDDEACFSNMSIYEEGETGNRFALWEDLELRGFLPLLPAHTILDFSSKHTFGSTKEKKARVQRIFAAGKSLLNFVQIDQLRIYFDSSSKKFVMAKNPPVSKTNTPLHESPDALKTSGTEMDYEAARRFDSVSSNMGTLQSKVQFCPDGDDDEEIVFKPTASEKFPKAPSDLLVNGYTHPVPMSTAGWPTNASLVPVQSTGSMTATGWPPNGGSNAFPSTASLSAAGNYNINQSLPRSSVGWAVNGEQSVIPSIAPRFELVQPVEEPVSSWTSSGAQHVGTQHKHTGLTFPDVVSEPLVSASMVQRFSSTDYSKFLSEQEMLLVNGLNTVNLTGNGYLKQRLQPGLSGLQSMGYSSQTPIEPGGTTANSMHNHLKITGENVPSTLDSVVPSIAPLGGMPMKFTEAPLTASKKNPVSRPSKPVGPPPGFDHVAPKRQDDSIPVEKLQIPQVDDYSWLDGYQQSIDHVHNLRTVYSGVSDSTAFATPFPFPGKQQLSGMHAQGATNEKTWQDFRLFEPSKQNMLQNYHQRNQQNGQIAEQEPANSVWSSSYHV

SEQ ID NO: 251 - DNA, 3174 bp, Zea mays
  source 1..3174: mol_type = unassigned DNA
atgatgaccgttcccatggatagtgctagcgcagccccgtcctctgcgcgggactttgctgagcgtctccttactaggaataatgaacttgaagatcagcttcgcaagtccgcacaatccaaagtcccatcagatcccagcatatggcttcagatgcgtgacaactttgagaagattattctcatagatcatgacctatctgaacagaaagaggtagagtatctcctatggaagttgcattacaaaagaattgaggacttcaggaggagcattagtgctgcaagctcagctgcatctcagagtgggaagagcaacgctaatccagatcgagtcaagagaattaaattaaccttcaaaagcttcctttcagaagcaactggcttctatcacgacttgatgttaaagatcaaatcaaatttgggccttccactcagttactttccagagggcatcgacaatgcaaacaactctgcgcgagatgacaagacaacagtgcagttgaagaaaggtttgatttcatgccatcgctgcctgatatatttgggagatcttgctcgttacaagagctcgcaaggtgatggtgattctgctagccgtgaatacgcagcggcatctagttactacatggaggctgcttctatctatccttccagtggcaaccctcatcatcagcttgctatactagcatcttactcaggcaacgaggtggtagctgtttataggtacttccgaagcttagctgcagatactccttttaccactgcacgtgacaacttgattattctttttgaaaagaatcgccaaagctatagacagctgccagacaacaacaaagttcccagcgctaaggcattacccccacggctatctgggaggggacaaggacggggagaagtaaagtttcagccaaaagatgttaacgcagaagcagctgaaagggaacaggagtgcaatgttcgtgatacattgaaggccttctatatacgatttgtcaggctcactggaattcttttcacgaggaccagtttggaaacatttggggagctgttttcttcagttagcaatgatttgcagattcttctttcttccggtcttgaggaggaccttaatttcggttctgatgctgcagaaaatgcattagctgctgttaggcttactatcatccttatattcacagtgcacaatgtaaataaagaacctgatagccagtcatattctgaacttgtgcaacgcagagtactgctccaaagtgcgtttacggctgcttttgattttgttggacgaattctcagaaggtgttcagaacttggtgatatcacatcaagcttctatctgccagccattctggtctacatcgaatggctggcgtcccatccagagttggctattgactcagagatggaggaacagcatgcaaatgccagatctttcttctggaaccaatgtatctcatttatgaataagttgatccttaccaaccttgcttctatggaggacaatgacgatgaggcttgcttttctaatatgagcatttatgaggagggtgaaactgggaacaggcttgccatttgggaagatcttgaattgagaggttttttgcccttggttcctgcacataccattttggatttctcaagcaaacacacatttggaaatgttggaagcaccaaggagaagaaagcacgggttcaacgaatttttgctgcaggaaagtcactgctgaactttgttcagattgatcagttgaggatatattttgatccatctttgaaaaagtttgtcttggccaagaactctcctgtttctagaactaacacccctcttcatgaatctcctgatgcacttaaaacaaatgggactgaaatggatcacaaggctgctagaagatttgattcagtttcttctaatgtgggctcactgcagtctaaagtgcagttttgtcctgatggtgatgatgaagaagaaattgttttcaagccaacagcttatgagaagttttcaaaagtttcttcagatctgtcagttaatggatacgtccatcctgtaccagtgtctgctgctggtgggccaaccaatgctagtttagtgcctgttcagaacactgcatcaatgtctgcaactcgtttaccatccaatccacatgcaactggtttgccatccaatggtgggtcacttccaagtactgcatctctatcagctgctggtaattacaacactgatcagtcgcttcccaggtcgtctgttggttggactgattgggctgtcaatagtgagcaaaatgttactcctagcattgctccaagatttgaactcatgcagtctgttgaggagcctgtttccagctggacaagcagtggggcacagcatgttggtcctcagcacaagcacacaggtttaactttcccagatgttgtctctgaaccatgtgtatctgcatcaatggttcaatgttttagtagctccgattattcgaaatttctcagagaacaagaaatattcttaatgaatggactgaagactgtcaacataactggaaatggctatctagagcagagattgcagcctggattgagtggtttacagtctatgggttattcatctcagatacctattcaacctggtggtaccactgcaaacctgatgcataatcatgtcaaaattactggagagactgtcccctctacacttgattcagttgtaccttcaatagcaccatcaggtggcatgccaatcaaacttacagaagcaccactaactgcttcgaagaagaaccctgttagtcgtccatcaaagcctgttggaccacctccaggatttaatcatgtaaccccaaagcgtcaagatgattctattccggttgaaaaactgcagaacccacaggtcgatgattacagctggctagatagctatcagcaatcgattgatcatgttcacagcttaagaactatttatcctggtgtcagtgatactagcactgcatttgccactccattctctttccctgggaggatacacacacaagggaccaatgaaaagacttggcaagatttccacctttttgagccttcaaaacagaacatgttccaaacttaccaccaaagaaatctgcaaagtggtcaaatggatgaacaagagccagcaaattctatctggtctagcagttaccatgtgtga

SEQ ID NO: 252 - protein, 1057 aa, Zea mays
MMTVPMDSASAAPSSARDFAERLLTRNNELEDQLRKSAQSKVPSDPSIWLQMRDNFEKIILIDHDLSEQKEVEYLLWKLHYKRIEDFRRSISAASSAASQSGKSNANPDRVKRIKLTFKSFLSEATGFYHDLMLKIKSNLGLPLSYFPEGIDNANNSARDDKTTVQLKKGLISCHRCLIYLGDLARYKSSQGDGDSASREYAAASSYYMEAASIYPSSGNPHHQLAILASYSGNEVVAVYRYFRSLAADTPFTTARDNLIILFEKNRQSYRQLPDNNKVPSAKALPPRLSGRGQGRGEVKFQPKDVNAEAAEREQECNVRDTLKAFYIRFVRLTGILFTRTSLETFGELFSSVSNDLQILLSSGLEEDLNFGSDAAENALAAVRLTIILIFTVHNVNKEPDSQSYSELVQRRVLLQSAFTAAFDFVGRILRRCSELGDITSSFYLPAILVYIEWLASHPELAIDSEMEEQHANARSFFWNQCISFMNKLILTNLASMEDNDDEACFSNMSIYEEGETGNRLAIWEDLELRGFLPLVPAHTILDFSSKHTFGNVGSTKEKKARVQRIFAAGKSLLNFVQIDQLRIYFDPSLKKFVLAKNSPVSRTNTPLHESPDALKTNGTEMDHKAARRFDSVSSNVGSLQSKVQFCPDGDDEEEIVFKPTAYEKFSKVSSDLSVNGYVHPVPVSAAGGPTNASLVPVQNTASMSATRLPSNPHATGLPSNGGSLPSTASLSAAGNYNTDQSLPRSSVGWTDWAVNSEQNVTPSIAPRFELMQSVEEPVSSWTSSGAQHVGPQHKHTGLTFPDVVSEPCVSASMVQCFSSSDYSKFLREQEIFLMNGLKTVNITGNGYLEQRLQPGLSGLQSMGYSSQIPIQPGGTTANLMHNHVKITGETVPSTLDSVVPSIAPSGGMPIKLTEAPLTASKKNPVSRPSKPVGPPPGFNHVTPKRQDDSIPVEKLQNPQVDDYSWLDSYQQSIDHVHSLRTIYPGVSDTSTAFATPFSFPGRIHTQGTNEKTWQDFHLFEPSKQNMFQTYHQRNLQSGQMDEQEPANSIWSSSYHV

SEQ ID NO: 253 - DNA, 684 bp, Zea mays
  source 1..684: mol_type = unassigned DNA
atgcctgagtccagggacggcaggagtgaggacctagctgacctttctggtggtgttggtggtggagggttctttatcaggagggtggcctcgccgggagccctagcggtgaggggtgtcaggaagccgttggcgcggcgttatatttcaccctcgaggaacaaggagaacctgctgccggtttgggcgttgagggtcacaccgacaaagaggagcccgcttcctggatggtaccccaggacgccgctccgtgatattacggccattgcaaaggctattcagagaagtcgttcaaggattgctgcagctcagcagcgaagccaaaggatcgagcagtcttcacaatctgtgaacgtgactactccagcacaagcagagcaggatgctcacattgctgaagcctcccatgctgttgcatctggctccggctcaactgaaagagaagctgtagcaaaccctgctactgttttggctgatgacaatttgaatgtgtcttctttggcagcagaaggctcattgaatactccatccaaaccaatggatcctgcccttgctgacaagaaactttccggttcaatagagaaggtagagaagttggtgaggaaaaacctgaagcgaacatcgagggctgcccaggcctccaggagggccacccaaaggcgcaatcttatgtccatgcgatga

SEQ ID NO: 254 - protein, 227 aa, Zea mays
MPESRDGRSEDLADLSGGVGGGGFFIRRVASPGALAVRGVRKPLARRYISPSRNKENLLPVWALRVTPTKRSPLPGWYPRTPLRDITAIAKAIQRSRSRIAAAQQRSQRIEQSSQSVNVTTPAQAEQDAHIAEASHAVASGSGSTEREAVANPATVLADDNLNVSSLAAEGSLNTPSKPMDPALADKKLSGSIEKVEKLVRKNLKRTSRAAQASRRATQRRNLMSMR

SEQ ID NO: 255 - DNA, 2349 bp, Zea mays
  source 1..2349: mol_type = unassigned DNA
atgcagatggacgtagagacggtgcaggcgggtcctgcgctcgcggctcatctgcagctgcaggcatcgccgaagccacaggtgaagaagtactacttcaagaagaagacgagcagtagtcatagcagaaatggtaaggatgatgtcaaccacgactccacgattcaacccaggtcgcccctgagcagacagagcctgaccttcgacgccatccccacataccacgctggagctttctacgagatcgaccacgataaattgccccctaaatccccaatccatctgaaatccatacgggtggttaaggtgagcgagtgcacgaacctggacatcacagtgaaattcccgtcccttcaggcgctgcgcagcttcttctcctcctacccggcacccggcaccggaccggaactagacgagcgcttcgtcatgagcagcaaccacgccgcgcgcatcttgcgccgccgagtgaccgaggaggagctcgagggcgaggtgcagcaggacagcttctggctcatcaagccccggctctatgacttcgccgcacctcagcaggtgccgtcacggacattgtgcctgccgccgccgcccgctccaccggcggctacgctggggctaacagctgactcctgtctactcaccacgttgaagtgcgatggcgccgggtggggtatgaggcgccgcgtcaggtacattggacggcatcgtgatgaagctcccaaggaggctagtgttgatggctacgacacagagtccagtgtcagggaggtgcagcagcctccagcgacgcaggaagttaaaaggagcgaaagaaactgtaaaagaaagcgggaggcggaagcgagcagcaaggacaacaacggagacgagggcaagaagaataacaaggttcagggcgccagcaagaagatttcaaaaaaggcgaagaagcggaccgtcgaatccaaggacggtgaccctcggcacggcaaggaccggtggtcagccgagcgctacgccgcagcagagaagagcctgctcaacatcatgcgctcccgagacgcacggttcggcgcaccggtgatgcggcaggtgctgcgggaggaagcccgcaagcacatcggcgacaccggcctccttgaccacctgctcaagcacatggctggccgggtgccggaaggcagcgttcaccggtttcgtcgccggcacaatgcggatggtgccatggagtactggcttgagccagccgagcttgctgaggtacggaaacaggccggtgtatctgatccatactgggtgccaccgccgggatggaaaccaggtgatgatgtgtccctcgtcgccggcgacattctagtcaagaggcaggttgaggagctcaccgaggaggtcaatggcgtaaaaaggcaaatggagcagttattgtgcaaggatgatggggacttcggtgcagagagagactacagttcattgaaagagaagtaccagcgtgctgtgagggctaatgaaaagcttgagaagcaggtgctctgtttgaaggacatgtgtgagaatgtggttcagatgaatggtgagctgaagaaggaggtgtcatccttcaaggaaaagtacgagcatatagctgacaagaatgataagttagaggagcaggttacctacctctccagctccttcctttctttcaaggatcagctggtagtggctctgaagctggaactggctccaagtgaagctgttccccgcacagcactgttcgttgcttccggtgagcagatgaccggcaccgtcatccaaggcggccaagacagggcggaaaggaagagcagcttccgcgtctgtaagccacagggcaagttcctgttgccgagcatggcgtctggcatgaccatcggcaggggcgccagcagcacctgcccggccgccgccacgccaggcccggggatccctcgcagcaccagtttccccagtatgccgggcctcccgcggtcgtcgcgaggcccagttgaggtggtggcggcggcgtccggcctggacgagcacgtgatgtttggcgcccacttctctacgccgccctcggcgtcgtccaccaacgacgctgccaagctgcagctgtccctgcccagcccgaggtcgcccctgcagccgcagaagctgtttgacactgttactgctgctgcttctgggtttagtccccaaaagctgatgcatttctccggcctgactcgacgcgatgtggacacctcgtcgtcatcgtccggggcctgcggttccggcctgctagaggggaagagggtcctgttcgatgcagacgccggcgggatcagcgcggtgggaaccgagctggccctggctactccatcctactgctga

SEQ ID NO: 256 - protein, 782 aa, Zea mays
MQMDVETVQAGPALAAHLQLQASPKPQVKKYYFKKKTSSSHSRNGKDDVNHDSTIQPRSPLSRQSLTFDAIPTYHAGAFYEIDHDKLPPKSPIHLKSIRVVKVSECTNLDITVKFPSLQALRSFFSSYPAPGTGPELDERFVMSSNHAARILRRRVTEEELEGEVQQDSFWLIKPRLYDFAAPQQVPSRTLCLPPPPAPPAATLGLTADSCLLTTLKCDGAGWGMRRRVRYIGRHRDEAPKEASVDGYDTESSVREVQQPPATQEVKRSERNCKRKREAEASSKDNNGDEGKKNNKVQGASKKISKKAKKRTVESKDGDPRHGKDRWSAERYAAAEKSLLNIMRSRDARFGAPVMRQVLREEARKHIGDTGLLDHLLKHMAGRVPEGSVHRFRRRHNADGAMEYWLEPAELAEVRKQAGVSDPYWVPPPGWKPGDDVSLVAGDILVKRQVEELTEEVNGVKRQMEQLLCKDDGDFGAERDYSSLKEKYQRAVRANEKLEKQVLCLKDMCENVVQMNGELKKEVSSFKEKYEHIADKNDKLEEQVTYLSSSFLSFKDQLVVALKLELAPSEAVPRTALFVASGEQMTGTVIQGGQDRAERKSSFRVCKPQGKFLLPSMASGMTIGRGASSTCPAAATPGPGIPRSTSFPSMPGLPRSSRGPVEVVAAASGLDEHVMFGAHFSTPPSASSTNDAAKLQLSLPSPRSPLQPQKLFDTVTAAASGFSPQKLMHFSGLTRRDVDTSSSSSGACGSGLLEGKRVLFDADAGGISAVGTELALATPSYC

SEQ ID NO: 257 - DNA, 981 bp, Zea mays
  source 1..981: mol_type = unassigned DNA
atgggatgcttccattccacggccaagcggcagcatcctggctacgaggaccctgtgcacctcgcctcccagacctcctttagtgttagtgaggttgaggctctattcgagctgttcaagagcataagtcgttcagtgattgacgatggcctgatcaacatggtatattctattactcatctctgtattccttgctatattgtcagttttgtgtatgaacatcaaaacaagccactcagacgtagaaaacttgacatacattactccattccgaaggacaatccttcggagaaggatattaaccaggggatgcttgttatatttaatgttgacccctctataacaaacaatgatatccatcagatatttagcgaatatggtgacataaaagagattcatgatgcaccgcaaaagggccatcacaaaattatagaattttataatgtcagagcagctgaaggtgcagctcgtgctttaaacaggagtgatcttgctggcaagaaaataaaactggagactggccgtctgagtggtgctagacgttcaacacaacacatgtccaaggagttggggttggaagaatttggcgtatacaacctgggcagtccaagcacaaatagcccttcattgccttcattgggtatgagcctgtcctctcccattggaattgcttctgctgcaactcatagtaaccaggctccccttggtgagatcagccactctcttagtcggatgaataggcatgtgaattatggttttcaaggcttgggtgctattcatccccattctcttcctgatgttcacaatggagcaaataatggcaccccttacaatctgaacaccatcacacctgttggtgtcaataagaactcaagaacagctgaagcagttgacagcagacatcttcataaagtgggttctggcaatctcaatgggcactcatttgatcgtgccggtgaaggagttgtaaagtggtggtga

SEQ ID NO: 258 - DNA, 1038 bp, Zea mays
  source 1..1038: mol_type = unassigned DNA
atgggatgcttccattccacggccaagcggcagcatcctggctacgaggaccccgtgcacctcgcctcccagacctcctttagtgttagtgaggttgaggctctattcgagctgttcaagagcataagtggttcagtgattgacgatggcctgatcaacaaggtaaattctattagtcatctctgtattccttgctatattgtcagttttgtgtatgaacatcaaaacaagccactcagacgtagaaaacttgacatacattactccattccgaaggacaatccttcggagaaggatattaaccaggggatgcttgctatatttaatgttgacccctctataacaaacaatgatatccatcagatatttagcgaatatggtgacataaaagagattcatgatgcaccgcaaaagggccatcacaaaattatagaattttatgatgtcagagcagccgaaggtgcagctcgtgctttaaacaggagtgatcttgctggcaagaaaataaaactggagactggccatctgagtggtgctagacgttcaacacagcacatgtccaaggagttggggcaggaagaatttggcatatacaacctgggcagtccaagcacaaatagcccttcattgccttcattgggttcatctaatatagtagcaatgacatcttgtggacgtgaaaatgggagtatgcatggtttgcattctggacttctcacatcaatgagcccgttcagagaggcttcatttctgggtctatcatctaccctaccacagagcctgtcctcgcccattggaattgcttctgctgcaactcatagcttgggtgctattcatccccattctcttcctgatgttcacaatggagcaaataatggcaccccttacaatctgaacaccatcacacctgttggtgtcaataagaactcaagaacagctgaagcagttgacaacagacatcttcataaagtgggttctggaaatctcaatgggcactcatttgatcgtgccggtgaaggagttgtaaagtggtggtga

SEQ ID NO: 259 - DNA, 1995 bp, Zea mays
  source 1..1995: mol_type = unassigned DNA
atggagggtgggggagggagtggaatgggtgggttcccggaagccacgggtaaccttctcgatgccgcagctcaggagttccaccctacggtctgtgccccctatcctctacagccgcttccgcaacagctatactgcccccacccatatccagccatgccggtgcctccgccgccgcaaatagccatgttacagccagtgcctccgatggcgatggccatggcgccgcagccggggtacaccttgccaacgacgacgccggtggtcaatggcccgtcgagccgcgtcgtggtgctgggccttgtcccgccgcacgcgcaggaggccgacgtggcgcaggcgatggcgccattcggcgcgatccgctcggtcgacgcgtgcgcggtggcgtccgagggcgtggccaccgtccatttcttcgacatccgcgccgccgagctcgccttgacctgtgtccgcgagcagcacatgcgccagcagagccgcctcgggcagctctacgcggcggccgccgtagccccggcgtgggctcctgcaccgacgccccaggcctgggactggccccaccccaacgacgacggccgcggcctcgtcctcgggcacgccgtgtgggcccacttcgccaccggcgccgacgacggcgacaaccgcggctccctggtggtcctgagccccctgcccggcgtctcggtcgctgacctccgccaagtcttccaggccttcggggacttgaaggatgtgagggagtcggcgcagcggcccagccacaagttcgtggacttcttcgacacgcgcgacgccgcgcgcgcgctcgccgagctcaacggccaggagcttttcggccgccgcctcgtcgtcgagttcacgcgcccttccggccccgggccccgcaggcgcgggtacgcaccccaccagcaccggcccaccgcgccgactccgccgaggcttcaagcgacgtggcgaccgtcccaaccgacgtcgtctcagccgccggcatcctcgtcgtcgtccggttccgtaagggcgagggaaggagtggtgcttctgaggaggagctcctgtaagtctagcgcgggcagcgaccagtcgtccaagggaggcaatgccggaacgagccatgagcgcaagaccaagggcggcaagatcgtggtggcggcggcggcggcatcctcgtcgaccccgacagcgtccgggaagcaaacccagaaaggcgtcgggagcagcggcggcgggagctggaaaggacgaaagagcgggtgggaggcgcgcttcctgttcaaggagcccgaggccggcggcggcgccgacacgcaagcaacgccggcttcggagatggatacgaggaccaccgtcatgatcaggaacataccgaacaagtacagccagaagctgctgctcaacatgctggacaaccactgcatccaatccaacgagtggatcgtggcgagcggcgaggagcagcccttctccgcctacgatttcgtctacctccccatagatttcaacaacaagtgtaatgtgggctacggcttcgtcaacctgacatcgccggaggctgccgtgcggctgtacaaggcgttccacaagcagccatgggaggtgtacaactcgcgcaagatctgccaagtgacatacgcgcgcgtacaaggcctggaagcgctgaaggagcacttcaagaactccaagttcccgtgcgacagcgacgagtacctgcccgtggcgttctcgccggcgcgcgacggcaaggagcttacggatccagtgcccatcgtgggccgctcgcccgcggcgtcgtccgcgtcgtcgcctcccaagagccgggcggctagcgtggaccggcttgggcaggagctgatgccggcgccgtcgtcatccgcggacggcgcgtcgtcgaccactacgtccacccacgcgccgtccgaacacgacgaggaggaggaggagggagacatcaggctcgcaggcgagctgcggcggcttggctacgacgactag

SEQ ID NO: 260 - DNA, 1086 bp, Zea mays
  source 1..1086: mol_type = unassigned DNA
atgggatgcttccattccacagccaagcggcagcatcctggctacgaggaccccgtgcacctcgcctcccagacctcctttagtgttagtgaggttgaggctctattcaagttgttcaagagcataagtggttcagtgattgacgatggcctgatcaacaaggacaatccttcggagaaggatattaaccaggggatgcttgttatatttaatgttgacccctctataacaaacaatgatatccatcagatatttagcgaatatggtgacataaaagagattcatgatgcaccgcaaaagggccatcacaaaattatagaattttatgatgtcagagcagccgaaggtgcagctcgtgctttaaacaggagtgatcttgcttgcaagaaaataaaactggagactggtcgtctgagtggtgctagacgttcaacacagcacatgtccaaggagttggggcaggaagaatttggcgtatacaacctgggcagtccaagcacaaatagcccttcattgccttcattgggtatggtgtttatttttttcatctttattgtatgtcatgtactcatgtctatggatgcatttcctgacgtgaggattattcttcaaggttcatctaatatagtagcaatgacatcttgtggacgtgaaaatgggagtatgcatggtttgcattctggacttctcacatcaatgagcccgttcagagaggcttcatttctgggtctatcatctaccctaccacagagcctgtcctctcccattggaattgcttctgctgcaactcatagtaaccaggctccccttggtgagctcagccactctcttagtcggatgaataggcatgtgaattatggttttcaaggcttgggtgctattcatccccattctcttcctgatgttcacaatggagcaaataatggcaccccttacaatctgaacaccatcacacctgttggtgtcaataagaactcaagaacagttgaagcagttgacagcagacatcttcataaagtgggttctggcaatctcaatgggcgctcatttgatcgtgccggtgaaggagttgtaaagtggtggtga

SEQ ID NO: 261 - DNA, 2880 bp, Zea mays
  source 1..2880: mol_type = unassigned DNA
atgccatttcaagtcatggatccgaggcaccacctctcccagttcaccaatacaaccgtagctgcgtcctccttctctgaggagcagcttcgccttcccacagagaggctggtgggtttttggaagcaggagtcgttgcatcacattgggagcaagtcagttgcatcttctccaattgaaaagccccaacccattggtacaaaaacaatgggtcgggtagatccacaaccatacaagccgagaggccagaagtctgcatttagccttgaacacaaaacttttggtcaagagaggcatgttaacatgccaccatctctgtggagagctgatcaagacccttatgttcaatctgattcatctttatttcccgatggaaggagtactaatccatatgaggcctacaacgagaatgggcttttctcaagctccctgtcagaaatttttgacagaaaattgggactgagatcaaatgatgtgcttctacatcaaccacttgaaaaggttgaaccaactcatgtagatgatgagccctttgagttaacagaggaaatcgaggctcaaataataggaaacatacttcctgatgatgatgatctactatcaggtgttgatgttgggtacacagcccatgctagcaatggtgatgatgttgatgatgatatattttacactggaggtgggatggaactggagaccgttgaaaataaaaaaagtacagaacctaacagtggagctaatgatggtcttgggtcgctaaatggcacaatgaatggtcaacatccatatggggaacacccttcaagaactcttttcgtccagaacattaatagcaatgttgaggattctgaattaaaggtcctatttgagcattatggagaaatcagcaacctttacactgcctgcaaacatcgcggttttgtaatgatatcttactatgacataaggtcatcatggaatgccatgagggcacttcaaaacaagccactaagacatagaaaacttgacatacattactccattccgaaggataatccttcggggaaggatattaaccaggggatgcttgttgtatttaatgttgacccgtctgtaacaaacaatgatatccataagatatttagtgactatggtgaaataaaagagattcgtgatgcaccgcaaaagggccatcacaaagttatagaattttacgatgtcagagcagctgaaggtgcagttcgtgctttaaacaggagtgatcttgctggcaagaaaataaatttggggactgttggtctgagtggtgttagacgattaacacagcacatgtccaaagagtcggggcaagaagaatttggtgtatgcaaactgggcagtctaagcacaaatagccctccattgccttcattgggttcatcttatatggtagccatgacatcttctggccgtgaaaatgggagtattcatggtttgcattctggactgctcacatcaatgagcccgttcagagaggcttcttttccgggcctatcatctaccataccacagagcctgtcctctcccattggaattgcatctgctacaactcatagtaatcaggctccccttggtgagctcagccactcacttagtcggatgaatgggcatatgaattatggttttcaaggcttgggtgctcttcatccccattctcttcctgaagttcacgatggagcaaataatggcaccccgtacaatctaaacaccatggtaccaattggtgtgaatagcaactcaagaacagccgaagcagttgactgcagacatcttcataaagtgggttctagcaacctcaatggacattcatttgatcgtgtcggtgaaggagctatgggattttcaagaagtggaagtggtcctgtccatggtcaccagctaatgtggaataattcaaataacttacaacgtcatcccaattcccctgtgctgtggcaaaatccaggatcatttgtaaataatgtaccgtctcgctccccagcacaaatgcatggagttccaagagcaccatcacacatgattgagaatgtccttccaatgcatcatcatcatgtgggctctgcgccagcaatcaatccatcactttgggacaggcggcatggctatgcaggggaattgacagaagcatcaagttttcatcttggcagtgttgggagcttgggatttcctggtagccctcagcttcatggcctggagctaaataacatattttctcacactggtgggaatcgcatggatccaaccgtgtcttcggctcagatcagcgcaccatctcctcaacagagaggtcctatgttccatggaaggaatcctatggttccccttccatcatttgattcacctggtgagcggataagaagcatgagaaatgactcaggtgctaaccagtctgataataaacggcagtacgagcttgatgttgaccgcataatgcgaggggtagactcacgaactacactgatgataaagaatatcccaaataagtatacctccaagatgctcttggctgctattgatgaaagtcataagggcacttatgactttatttacttgccaattgattttaagaataaatgtaatgttggctatgctttcatcaacatgaccaatgctcagcatatcattccattttatcagacttttaatggtaaaaagtgggagaagtttaacagtgagaaggtggcatcacttgcttatgctagaatccaagggaaaacagctctgattgctcatttccagaactctagtttgatgaatgaggacaaacgttgccgccccatactcttccactcagatggtcctaatgcaggagatcagtgcactgtgacgagtcttctatataatccatataccttgaatccttga

SEQ ID NO: 262 - DNA, 2988 bp, Zea mays
  source 1..2988: mol_type = unassigned DNA
atgccatctcaagtcatggatccgaggcgccacctctcccagttcagcaatccaaccgtggctgcgtcctccttctctgaggagcagtttcgccttcccacagagaggcaggtcggattttggaagcaggagtcgctgcatcacattggaagcaagtcagttgcatcttctccaattgaaaagccccaacccattgggacaaaaactgtgggtcgggtagaaccacaaccatacaagctgagagaccagaagactgcatttagccttgagcacaagacttttggtcaagagagacatgttaacctaccaccatctctgtggagagctgatcaagaccctaacctccaatctgatccatctttatttcccgatggaaggaggactagtccaaatgaggcctacaacgagaatgggcttttctcaagctccctatcagaaatttttgacagaaaattgggactgagatccatggatgtgcgtctacgccagccagttcaaaaggttgatctaactcatgtagatgatgagccctttgagttaacagaggaaatcgaggcgcaaataataggaaacatacttcctgatgatgatgacctactatcagatgttcttgatgttgggtacacagcccatgctaacatgggtgatgatgtcgatgatgatatattctacactggaggcgggatggaactggaaaccgatgaaaataaaaaaaatacagaacttaatggagctaatgatggtcttgggttgctaaatggcacaatgaatggtgaacatccatatggggaacacccttcaagaactctttttgtccgaaacattaatagcagcgttgaggattctgaattaaaactcctatttgaaaattatggagaaatcagcaacctttacactgcctgcaaacatcgtggttttgtgatgatatcttactatgacataagatcagcatggaatgccatgagggcacttcaaaacaagccactcagacgtagaaaacttgacatacattactccattccgaaggacaatccttcggagaaggatattaaccaggggatgcttgttgtatttaatgttgacccctctataacaaacaatgatatccatcagatatttagcgaatatggtgacataaaagagattcgcgatgcaccgcaaaagggccatcacaaaattatagaattttatgatgtcagagcagccgaaggtgcagctcgtgctttaaacaggagtgatcttgctggcaagaaaataaaactggagactggccgtctgagtggtgctagacgttcaacacagcacatgtccaaggagttggggcaggaagaatttggtgtatgcaaactgggcagtccaagcacaaatagcccttcattgccttcattgggttcatctaatatagcagcaatgacatcttgtggacgtgaaaatgggagtatgcatggtttgcattctggacttctcacatcaatgagcccgttcagagaggcttcatttctgggtctatcatctaccctaccacagagcctgtcctctcccattggaattgcttctgctgcaactcatagtaaccaggctccccttggtgagctcagccactctcttagtcggatgaatgggcatgtgaattatggttttcaaggcttgggtgctattcatccccattctcttcctgatgttcacaatggagcaaataatggcaccccttacaatctgaacaccatcacacctgttggtgtcaataagaactcaagaacagctgaagcagttgacagcagacatcttcataaagtgggttctggcaatctcaatgggcactcatttgatcgtgccggtgaaggagccatgggattttcaagaagtggaagcggtcataactgtggtcaccagttaatgtggaataattcaaataacttccacggtcatcccaattctcctgtgctgtggcaaaatcccggatcatttgtaaataatgtaccgtctcgccccccagcacaaatgcatggagttccaagagcaccatcacacatgattgagaatgttcttccaatgcatcatcatcatgtgggctctgcgccagcaatcaatccgtcactttgggacaggcggcatggctatgcaggggacttgacagaagcatcaagttttcatcctggcagtgttgggagcatgggatttcctggtagccctcagcttcatggtctggagctaaatagcatattttctcacactggtgggagtcgcatggatccaactgtgtcttcagctcagatcagcgcaccatctcaacagagaggtcctatgttccatggaaggaatcctatggtcccccttccttcatttgattcacctggtgagcggatgagaagccggagaaatgattcaggtgttaaccagtctgataataagcggcagtatgagcttgatgttgaccgcataatgcggggggaagactcacgaactacactgatgataaagaatatcccaaataagtatacctccaagatgctcttggctgctattgatgaaagtcataagggcacttatgattttatttacttgccaattgattttaagaataaatgtaatgtcggctatgctttcatcaacatgaccaatcctcagcatatcattccgttttatcagagttttaatggtaaaaagtgggagaagtttaacagtgagaaggtggcatcacttgcttatgccagaatccaagggaaaacagccctgattgctcatttccagaactctagtttgatgaatgaggacaaacgctgccgccccatacttttccactcagatggtcctaatgcaggagatcaggaacctttccccatgggttcaaacatccgagccaggtctgggagatcccggacttcttcgggtgaagaaaatcaccatgacatccagacagtcttgaccaacggtgacacttcttccaatggagctgacaattcaggtcccaccaaggatactgagtag

SEQ ID NO: 263 - DNA, 2823 bp, Zea mays
  source 1..2823: mol_type = unassigned DNA
atggtgatagcgtcgggagccgttgacaggggccacctgtccccgattgctcccctgtcagagtcgccgtcgtcctcatcattcttctcccaggatctcgtccccactgagaggcaagttggattctggaaatcgtcagagtcaatggtcgatcacaaagggagcaagcctattttcacttctccactcgataaggcccatcccataggctcaagtcctgcaggtggtctggaacatcaacgaggtcaagccttcaaggggaagctgggcatgcttaaccttggtaatttggtggaccaacaagaaaatgctcctggcataccttcgatttcttggggtgatgtcctcagtacctccaggtccagtcttggcttgtctacaggagggacggcttttgttgaaccacccagtgctgatcaacatgtgcaagactatggagactgcttttcatccagctccttcactgaagtcttcggtagaaaatcagcaagattgatggcaagtggcgtttatggccaatcagctggtgcaaatgattccggttatgacggagatgaacctctagggtccatgaaagaaatggaagctcaaactattggtgatctccttcctgatgacgatgacctgatgtcgggaattattgatggctttgaatacaccggcttgtctaaccaggatgatgccgatgaagatatattctacactggaggaggtttggagctagagcatgatgattccaacaacgtcgacaaatttcgtgatgtgtccttcaagattcaactttctgagaagcactctatcgataaacaccattccagagctcttattgtaaaaaatattaatccaggcatcgagggttctgatttaagggctctgtttcagcaatatggggacgtacagacattcgacacatcctgcaagagccatggaattgttacagtgtcttactatgacattagagctgcacaggacgcagtgagagcagtccataacaaacctctggggctgatgaaacttgatgttcaattttcccttcctaaggaaaatgttccaaacaaagatcccaacaatggaacactggtggtatctcttattgactcttccatctccagccatgatcttctccaaaaatttagtgtttatggcgatgtcaaggagatttacaagtctcctacaagctgcaataagaaatttgtagaattctatgatatcagagcagcacaagaagcactgaatgacctcaacaagggtgaaatatcatgctcacaaatcaaagttgagcatagcttttctggaggagcaggatcttgcttcgcagagcaatattcaggagaacagaagcaaaatgccgtagctcaccaacttaagaactctccacctgggaccattgggaagttagatactaagagttgggacagcagcactgttcataatttatattctccagttagaccgcaacacgataaatcacaacatggcttctctgtgaatcctcctcagaagttgtcatcgcctatcagaattgaatctacacagcagcatagtaatcaaactgcttttggtgaacatagtggatctcttggtcatggcaactttggaggtgggctgcaagccttccacccgcactcactgccagagtgtcacaatggtatttgcaatggctataactccatgacattaaatgcaaggaattctaacttcagatttactgaaggaatagactacaataatcacaaagttgaccacagtgaccttcatggtcattcctctgatcaaaatgaagcaattagagttgctggaattggaagttgcccccttcatggacatcactatacctggagtaactcaaatggttttcctcaaagcccctctgctccaatgatgtggcctaactttcagcaaccagtgcatatgcattgctaccctgctatgcctcctcacatccggcgcagtgctgcccatcctatggaccaacatcacttgggttcagctccaaacagtgttggtggttttgcaaatgcacactcttttcatccaggatcccttgaaagcgtagggtttcctggcagccctcagctgtatccatcagatctctctgtatttgcatctgccagaggaaattacagggagaccatgttctctgccataagtgccgggtttccatcaattcagcaaattcttcatgcgaccaacggaaggaatcctatgatgcacgtctccacctcatatgacgccactaatgatcgcataaggagccgcaggcatgatggaaatgctgcccagtctgaaaacaagaagcagtttgagctggaccttgaccgcatagctaagggtgaagactcgcgcaccacactgatgataaaaaacattcctaacaagtacaccagtaagctgcttttggctgtcattgatgagaatcaccgaggaacttatgatttcatctaccttccaattgattttaagaataaatgtaacgtgggatatgcattcatcaatatgacggatccacagcagatagttccattttacaagacattcaacggcaagaaatgggagaagttcaatagtgagaaagtggcatcacttgcgtacgccagaatccagggaaggaacgctttgattgctcatttccagaattctagcctgatgaatgaagagaaatggtgccgccctatgcttttccacaaagatggcccgaacgcaggagaccaggaaccattccctgtgggtaacaatgttcgttctcggtccgggaggaacagaccacttagcagtggttcggagactaccaaagaggcaagtccatcaacctctcctaactga

SEQ ID NO: 264 - DNA, 945 bp, Zea mays
  source 1..945: mol_type = unassigned DNA
atgctccaaagattgctccaattggcaaggatagcaatcggtctaaatatgatcaagtcttctcaaatggtaaccagtcactggggagctgcatttcagcactcccactcatatcaagatcacaacagtgaacagatgagttctagtcctgggactttatcagggccccagtttctctggggaagtccaaagccatattcagaacattcaaaatcccctatttggcgtccaccagcaaacggacctgcattgtcatccagtagtcgcactcagggccaaggattcttgtacagtagccgtcaggcttcattatttggttctttagatcagcaccatcatcatgttggctctgccccttcaggtgctccattcgagaaccattttggctttttatcagaatcgccagagacatcttatatgaagcaactcaagtttgggaacatgggtaatgttggtattggtagaaacgggggaggcctcatgctgggcatggctagtcatgcttctgtgaatcctggttcttctctgattggaagtctgacagataacgtatcttctagcttcagaccgatattgtcaccgagattgggacaggcattttacactaatcctccataccatgggcctggtacattcggacttgacagctccattgaccatgcccgtaaccgcagagttgacagcagtgtgttgcaagctgatagcaagaggcagtatctgcttgacttggagaagattcgcagaggtgatgatactcggacaacattgatgattaagaacatcccgaacaaatatacatctaagatgctcctggctgcaattgatgagcttcacaaaggaatttatgacttcttctacctgccaattgatttcaagaacaaatgcaatgttggatatgcgttcattaacatggtatcaccggtgcacattatatccttctaccag

SEQ ID NO: 265 - DNA, 2472 bp, Zea mays
  source 1..2472: mol_type = unassigned DNA
atggccgcaaataacaacccttggagggtccctatgccaccgctgctcaatgttcgagctggttttggcgatacaagtctcttctcaacctcactgcctgttcttcctcatgaaaagttgatcttttctcattcttctcatggtaccccatcaaaggatgacgcttcggccaaaatgaaagtgcttgctgatgatcctgatgagaaagactacaagttcgattttgatcttcgacagatagatgacttgttgcctgatgaagatgagtttttcgcggggatcactgatgaaactgagcccatcgggcaaacaaataccacagaggaattggaggagtttgatgtctttggcaatggagggggcatggagctggatattgaccctgtggagaccatcacagttagttttgcaaattcaagtattgtggacggggctagaggcaatggcatcaacccttttggtgtcccaaacactgtaggaactgtggctggggagcacccatttggagagcacccttccaggaccttgttcgtaaggaacatcaatagcaacgtcgaggactctgaactgcgatctttgtttgagcaatatggggatatccgtaccctttacactgcaacaaagcataggggctttgtaatgatatcttatttcgacatcagagctgcacggaatgcaatgcgcgcattgcagaacaaacctctgaggaggagaaagctggacattcatttttccatcccaaaggagaatccatctgacaaagatttaaaccagggaactcttgttatttttaacttggatccatcggtttctaatgaagaggttcgccagatttttggggcatatggggaagtaaaggagataagagagacaccaaacaagaaacatcataagtttatagagttctatgatgtaagagcagcagaggctgctcttcggtcactgaataaaagtgagatagctggaaaacgaatcaagttggaaccaagtcgtcctggtggaacacgcagaaacttgatgcagcagctcggtcacgatttggaccaagaggagcccagaagctacagacatcctcatgttggttcacctattgctaactctcctccaggggcatgggctcactatagtagtccaacagataacaatatgctgcaagctttcactaggtctccaactggaaatggaatgagtcctatcggaatgccttcactgatctcaaatgctccaaagattgctccaattggcaaggatagcaatcggtctaaatatgatcaagtcttctcaaatggtaaccagtcactgggagctgcatttcagcactcccactcatatcaagatcacaacagtgaacagatgagttctagtcctgggactttatcagggccccagtttctctggggaagtccaaagccatattcagaacattcaaaatcccctatttggcgtccaccagcaaacggacctgcattgtcatccagtagtcgcactcagggccaaggattcttgtacagtagccgtcaggcttcattatttggttctttagatcagcaccatcatcatgttggctctgccccttcaggtgctccattcgagaaccattttggctttttatcagaatcgccagagacatcttatatgaagcaactcaagtttgggaacatgggtaatgttggtattggtagaaacgggggaggcctcatgctgggcatggctagtcatgcttctgtgaatcctggttcttctctgattggaagtctgacagataacgtatcttctagcttcagaccgatattgtcaccgagattgggacaggcattttacactaatcctccataccatgggcctggtacattcggacttgacagctccattgaccatgcccgtaaccgcagagttgacagcagtgtgttgcaagctgatagcaagaggcagtatctgcttgacttggagaagattcgcagaggtgatgatactcggacaacattgatgattaagaacatcccgaacaaatatacatctaagatgctcctggctgcaattgatgagcttcacaaaggaatttatgacttcttctacctgccaattgatttcaagaacaaatgcaatgttggatatgcgttcattaacatggtatcaccggtgcacattatatccttctaccaggcttttaatggtaagaaatgggagaagttcaacagtgagaaggtagcatctttggcttatgctagaattcaaggacggtctgcactgatatcacattttcaaaattcaagtttgatgaatgaggataagaggtgccgccccattctttttaatcccaatggtcaggactctgtgaatcaggaagcattcccaattaatggtatatgcatccacatgcccctggaagatgattgccttgacaatgaagaaaacaagagtctgaacgagaagacaggagagaactctactgatatcgctgggagtttgtga

SEQ ID NO: 266 - DNA, 2544 bp, Zea mays
  source 1..2544: mol_type = unassigned DNA
atggatcgatcgtcagattcttccaatccaccaggtcttgccgtgcctgccgcctcaaagccaccacagatggccgcaaataacaacccttggagggcccctctgccaccgctgctcaatgctcgcgctggttttggtggcgatacaagcctcttctcaacctcgctgccggttcttcctcatgaaaagttgatctttgctgattcttctcatggtaccccaccaatggatgacactttgaccaaaatgaaagtcctggctaatgatcctgatgagaaggactacaaatttgattttgatcttcggcagatagatgacttgttgccagatgaagatgagtttttcgcggggatcactgatgagactgagcccgttgcgcagacaaataccacggaggaattggaggagtttgatgtgtttggcaatggagggggcatggagctggacattgaccctgtggagagcatcacagttggttttgcaaattcaagtattgtcgacggggctagatgcaatagcatcaacccttttggtgtcccaagcactgtaggaactgtggctggggagcacccgtttggagagcacccttcgaggaccttgtttgtaaggaacatcaatagcaatgtcgaggactctgaactgcgatctttgtttgagcaatatggggacatccggaccctttacactgcaacaaagcacaggggctttgtaatgatatcttattttgatatcagagctgcacggaatgcaatgcgcgcattgcagaacaaacctctgaggaggagaaagctggacattcatttttccatcccaaaggagaatccatctgacaaagatttgaaccagggaactcttgttatttttaacttggatccgtcggtttctaatgaagaggttcgccagatttttggggcatatggtgaagtaaaggagataagagagacaccaaacaagaaacaccataagtttattgagttctatgatgtaagagcagcagaggctgctcttcggtcactgaataaaagtgagatagctggaaaacgaatcaagttggaaccaagtcgtcctggtggaacacgcagaaacttgatgcagcaacttggtcacgatttggaccaagaagagccaagaacctacagacattctcatgttggttcacctattgctaactctcctccaggggcatgggctcagtacagtagtccaacagatagcaatatgctgcaagctttcaccagatctccaactggaaatggaatgagtcctatcggaattccttccctgatttcaaatgctccaaagattgctcctattggcaaggatagcaaccggtctaagtatgatcaagtgttttcaaatggtaaccagtccgtgggagctgcatttcagcactcccactcataccaagatcacaacagtgaacacatgagttctagtcctgggactttatcagggccccagtttctctggggcagtccaaagccatattcagaacattcaaaatcccctatttggcatccaccaggaatcggatctgcattgtcatccagcagtcgcactcagggccaaggattcttgtacagtagccgtcaggcttcattatttggttcttcggatcagcaccatcatcatgttggctctgccccttcaggtgctccatttgagagccattttggcttcttacctgaatcgccagagacatcttttatgaagcaagccaggtttgggaacatgggtaattttggtactggccgaaacgggggaggtctcctgctgggcatggctaatcgtgcttctgtgaatcctggttcttctctaattggaagtctgacagataacagctctactaacttcagaccgatgttgtcgcctagattgggacagacattttacactaatcctccataccatgggattggtacattcggacttgacagctccattgaccgtgtccgcaaccgccgggttgacagcagtgtgttgcaggctgatagcaagaggcagtatcagcttgacttggagaagattcacagaggtgatgatactcggacaacattgatgattaagaacatcccaaacaagtatacatctaagatgctcctggctgcaattgatgagcttcacagaggaacttatgactttttctacctgccaattgatttcaagaacaaatgcaatgttggatacgcgttcgttaacatgatatcgccggtgcatattatatccttctaccaggcttttaatggtaagaaatgggaaaagttcaacagcgagaaggtagcctcgttggcttatgctagaattcaaggacggtctgcactgatatcacattttcaaaattcaagtttgatgaatgaggataagaggtgccgccccattctttttaatcccaatggtcaggagtctgtgcaccaggaagcatttccaatcaatggcatatgcatccacatgcttccggaagatgattaccttgacaatgaagatggcaagagtctgaacgagaagactggagagagctcgaccgatatggccgggagtttgtga

SEQ ID NO: 267 - DNA, 2859 bp, Zea mays
  source 1..2859: mol_type = unassigned DNA
atggccccggttttgttcgggacccaaatttccgcgcacttcgtcaaggtttctgtgtttatggctttatgctttgaatttctgatccgtttgaaccgagctcacgggagcgttgaaacttgtctctgtgttttaaggtccggggtgaggcgcagcgcccgcaggatgccaaccgagcagaggcgctacatgcccccggcccattttcttccggcggagtcggaatcgtcctccttccctgacgagcttcgcttgcgtcctgagaggcaagttggacttttgaagcagggttgctttcctgagcatgctggcagatttgcttgttctcccctgcaaaagctcaagtgtattggcgcaacagtagtggatcagctagatattatgcagccacacaagctaatggaccagaaagtgccatttagccttgatgacaagttgttggatgttaagctgccaccatcttcctggagagaggatcaggatccagcaaaccaactcgattcttttcccaagccattggtttcacctctagaaggtagaaggggaagtgtaaatgggacccaatatgaaagtggacttttctctagctcccttccagaattttttgacaagaaaagtggaatggaattggaagcagatggaaatagcaaattgttaaactttaatggtggagccagtcagactaggtcaattgtccaactcaatggtgagcgatcctcgagaatcctttttgtcggaaacattgatagcaacgtcgaggattctgaattgaaattcatgtttgagcaatatggagacatgcagacacttaatgcttcttgcaaacatcatggttttgtgatggtatcttactatgatataagatcggcagaaaatgctatgagggcccttcaaagcaagccactcagatgtaggaaacttgacatacgttactcgagtccaaaggactatcctttggataaagatatcaacctgtccatggtaatagttaatcttgaagcttcgataactaatgatgacctgcaccagatatttggtgtctttggtgaaatcaaggagattcaccctacttcagataatgaccattacaaatcgatagaattttttgatgtcagagcagctgaagctgcacaatatgccttaaacaggagtgaaatttcaggaaataaaaacaaattggagcctagctgtctgggtggtactgaacgtttgatgcagcagatgtctcgtgcattggaacatgaacagtttggtgcatgtaaactcggaagcccaaacagtccttcaacatgctttggttctgtcaatatggcacccatcagatccactagcacagaaagtggaactgttcaggttttatgttctagagttcagacaccgataaaccaattccgagagggaaggaattttctggatcttccctcaactaccataagtagatcctctcctgttggaattacacctgcaggattacaaagcggccaccacgctcttgatgagcacatccattcacttggaaagatgaatgtacagaacaagggacgaatggattgtggatttcaagagagtactgctttccatcctcattctctccctgacttcaatgacagactaagaaatgcaatggatgtcaggcacatttacaaaggaggttgtgggcatctcagcaatcaatcttctgctcatactgaagcacttgggttttcaagaactggtagctgccctctctatggtcaccaactagcatggagtaattctaataacctacaccagcagccttcttctcccatgatatggcctagcatgggcccatttaccaataatatgccatctcgccagttgatgcaagtgcatggaatttcaagagcaccattgcgcatgcttgaaaataatatccctatgaatcaccaacatgtgggatctgccccagctgtcaatccatcaatttgggatagacgacatggatatgcaggggagatgatggaaacaccaggattccacccagggagtgctggaagcatgggtttccctggcagcacacatctgcatcagttggagaccaatggtatgtttcctcacaatggagggactttcatggacccagctatgtctcctgtgcacatgagtgctcgctctcctcagcagagggggcatattttccatcgaaggagcaatgtggctcctattccatcctctttcgattctgctggtgaacggatgcggagccgaagaaatgactcgaatgtaaatcaatctgacaacaaaaggctgtttgagcttgacattgagcgtatagtccggggcgaggactcccggactacactgatgataaagaatatcccaaacaagtacacatcaaagatgcttctggcagctattgatgaaagtcaccggggaacttatgattttatctacctgccaattgactttaagaataagtgcaatgttggttatgcattcatcaacatgatcaatcctgacaatattgttccattttataagacatttcatgggaaaaggtgggagaaattcaacagtgagaaagtggcctcacttgcttatgctagaatccaaggaaaatcagctctagttgctcatttccagaactcaagtttgatgaatgaggataaacgctgccgccctatactcttccactctgatggtccgaatgcaggagatcaagaaccattccctgtgggatcaaatgtccgttccaggcctggaaggtccaggattttgagttgggaacaaaaccaccaggacattgtgtctgatcataccaaaggtggaactccgagcagggctggtggcactccaggttacatcgccacggatactgatcatacggctgttgattga

SEQ ID NO: 268 - protein, 326 aa, Zea mays
MGCFHSTAKRQHPGYEDPVHLASQTSFSVSEVEALFELFKSISRSVIDDGLINMVYSITHLCIPCYIVSFVYEHQNKPLRRRKLDIHYSIPKDNPSEKDINQGMLVIFNVDPSITNNDIHQIFSEYGDIKEIHDAPQKGHHKIIEFYNVRAAEGAARALNRSDLAGKKIKLETGRLSGARRSTQHMSKELGLEEFGVYNLGSPSTNSPSLPSLGMSLSSPIGIASAATHSNQAPLGEISHSLSRMNRHVNYGFQGLGAIHPHSLPDVHNGANNGTPYNLNTITPVGVNKNSRTAEAVDSRHLHKVGSGNLNGHSFDRAGEGVVKWW

SEQ ID NO: 269 - protein, 345 aa, Zea mays
MGCFHSTAKRQHPGYEDPVHLASQTSFSVSEVEALFELFKSISGSVIDDGLINKVNSISHLCIPCYIVSFVYEHQNKPLRRRKLDIHYSIPKDNPSEKDINQGMLAIFNVDPSITNNDIHQIFSEYGDIKEIHDAPQKGHHKIIEFYDVRAAEGAARALNRSDLAGKKIKLETGHLSGARRSTQHMSKELGQEEFGIYNLGSPSTNSPSLPSLGSSNIVAMTSCGRENGSMHGLHSGLLTSMSPFREASFLGLSSTLPQSLSSPIGIASAATHSLGAIHPHSLPDVHNGANNGTPYNLNTITPVGVNKNSRTAEAVDNRHLHKVGSGNLNGHSFDRAGEGVVKWW

SEQ ID NO: 270 - protein, 664 aa, Zea mays
MEGGGGSGMGGFPEATGNLLDAAAQEFHPTVCAPYPLQPLPQQLYCPHPYPAMPVPPPPQIAMLQPVPPMAMAMAPQPGYTLPTTTPVVNGPSSRVVVLGLVPPHAQEADVAQAMAPFGAIRSVDACAVASEGVATVHFFDIRAAELALTCVREQHMRQQSRLGQLYAAAAVAPAWAPAPTPQAWDWPHPNDDGRGLVLGHAVWAHFATGADDGDNRGSLVVLSPLPGVSVADLRQVFQAFGDLKDVRESAQRPSHKFVDFFDTRDAARALAELNGQELFGRRLVVEFTRPSGPGPRRRGYAPHQHRPTAPTPPRLQATWRPSQPTSSQPPASSSSSGSVRAREGVVLLRRSSCKSSAGSDQSSKGGNAGTSHERKTKGGKIVVAAAAASSSTPTASGKQTQKGVGSSGGGSWKGRKSGWEARFLFKEPEAGGGADTQATPASEMDTRTTVMIRNIPNKYSQKLLLNMLDNHCIQSNEWIVASGEEQPFSAYDFVYLPIDFNNKCNVGYGFVNLTSPEAAVRLYKAFHKQPWEVYNSRKICQVTYARVQGLEALKEHFKNSKFPCDSDEYLPVAFSPARDGKELTDPVPIVGRSPAASSASSPPKSRAASVDRLGQELMPAPSSSADGASSTTTSTHAPSEHDEEEEEGDIRLAGELRRLGYDD

SEQ ID NO: 271 - protein, 361 aa, Zea mays
MGCFHSTAKRQHPGYEDPVHLASQTSFSVSEVEALFKLFKSISGSVIDDGLINKDNPSEKDINQGMLVIFNVDPSITNNDIHQIFSEYGDIKEIHDAPQKGHHKIIEFYDVRAAEGAARALNRSDLACKKIKLETGRLSGARRSTQHMSKELGQEEFGVYNLGSPSTNSPSLPSLGMVFIFFIFIVCHVLMSMDAFPDVRIILQGSSNIVAMTSCGRENGSMHGLHSGLLTSMSPFREASFLGLSSTLPQSLSSPIGIASAATHSNQAPLGELSHSLSRMNRHVNYGFQGLGAIHPHSLPDVHNGANNGTPYNLNTITPVGVNKNSRTVEAVDSRHLHKVGSGNLNGRSFDRAGEGVVKWW

SEQ ID NO: 272 - protein, 959 aa, Zea mays
MPFQVMDPRHHLSQFTNTTVAASSFSEEQLRLPTERLVGFWKQESLHHIGSKSVASSPIEKPQPIGTKTMGRVDPQPYKPRGQKSAFSLEHKTFGQERHVNMPPSLWRADQDPYVQSDSSLFPDGRSTNPYEAYNENGLFSSSLSEIFDRKLGLRSNDVLLHQPLEKVEPTHVDDEPFELTEEIEAQIIGNILPDDDDLLSGVDVGYTAHASNGDDVDDDIFYTGGGMELETVENKKSTEPNSGANDGLGSLNGTMNGQHPYGEHPSRTLFVQNINSNVEDSELKVLFEHYGEISNLYTACKHRGFVMISYYDIRSSWNAMRALQNKPLRHRKLDIHYSIPKDNPSGKDINQGMLVVFNVDPSVTNNDIHKIFSDYGEIKEIRDAPQKGHHKVIEFYDVRAAEGAVRALNRSDLAGKKINLGTVGLSGVRRLTQHMSKESGQEEFGVCKLGSLSTNSPPLPSLGSSYMVAMTSSGRENGSIHGLHSGLLTSMSPFREASFPGLSSTIPQSLSSPIGIASATTHSNQAPLGELSHSLSRMNGHMNYGFQGLGALHPHSLPEVHDGANNGTPYNLNTMVPIGVNSNSRTAEAVDCRHLHKVGSSNLNGHSFDRVGEGAMGFSRSGSGPVHGHQLMWNNSNNLQRHPNSPVLWQNPGSFVNNVPSRSPAQMHGVPRAPSHMIENVLPMHHHHVGSAPAINPSLWDRRHGYAGELTEASSFHLGSVGSLGFPGSPQLHGLELNNIFSHTGGNRMDPTVSSAQISAPSPQQRGPMFHGRNPMVPLPSFDSPGERIRSMRNDSGANQSDNKRQYELDVDRIMRGVDSRTTLMIKNIPNKYTSKMLLAAIDESHKGTYDFIYLPIDFKNKCNVGYAFINMTNAQHIIPFYQTFNGKKWEKFNSEKVASLAYARIQGKTALIAHFQNSSLMNEDKRCRPILFHSDGPNAGDQCTVTSLLYNPYTLNP

SEQ ID NO: 273 - protein, 995 aa, Zea mays
MPSQVMDPRRHLSQFSNPTVAASSFSEEQFRLPTERQVGFWKQESLHHIGSKSVASSPIEKPQPIGTKTVGRVEPQPYKLRDQKTAFSLEHKTFGQERHVNLPPSLWRADQDPNLQSDPSLFPDGRRTSPNEAYNENGLFSSSLSEIFDRKLGLRSMDVRLRQPVQKVDLTHVDDEPFELTEEIEAQIIGNILPDDDDLLSDVLDVGYTAHANMGDDVDDDIFYTGGGMELETDENKKNTELNGANDGLGLLNGTMNGEHPYGEHPSRTLFVRNINSSVEDSELKLLFENYGEISNLYTACKHRGFVMISYYDIRSAWNAMRALQNKPLRRRKLDIHYSIPKDNPSEKDINQGMLVVFNVDPSITNNDIHQIFSEYGDIKEIRDAPQKGHHKIIEFYDVRAAEGAARALNRSDLAGKKIKLETGRLSGARRSTQHMSKELGQEEFGVCKLGSPSTNSPSLPSLGSSNIAAMTSCGRENGSMHGLHSGLLTSMSPFREASFLGLSSTLPQSLSSPIGIASAATHSNQAPLGELSHSLSRMNGHVNYGFQGLGAIHPHSLPDVHNGANNGTPYNLNTITPVGVNKNSRTAEAVDSRHLHKVGSGNLNGHSFDRAGEGAMGFSRSGSGHNCGHQLMWNNSNNFHGHPNSPVLWQNPGSFVNNVPSRPPAQMHGVPRAPSHMIENVLPMHHHHVGSAPAINPSLWDRRHGYAGDLTEASSFHPGSVGSMGFPGSPQLHGLELNSIFSHTGGSRMDPTVSSAQISAPSQQRGPMFHGRNPMVPLPSFDSPGERMRSRRNDSGVNQSDNKRQYELDVDRIMRGEDSRTTLMIKNIPNKYTSKMLLAAIDESHKGTYDFIYLPIDFKNKCNVGYAFINMTNPQHIIPFYQSFNGKKWEKFNSEKVASLAYARIQGKTALIAHFQNSSLMNEDKRCRPILFHSDGPNAGDQEPFPMGSNIRARSGRSRTSSGEENHHDIQTVLTNGDTSSNGADNSGPTKDTE

SEQ ID NO: 274 - protein, 940 aa, Zea mays
MVIASGAVDRGHLSPIAPLSESPSSSSFFSQDLVPTERQVGFWKSSESMVDHKGSKPIFTSPLDKAHPIGSSPAGGLEHQRGQAFKGKLGMLNLGNLVDQQENAPGIPSISWGDVLSTSRSSLGLSTGGTAFVEPPSADQHVQDYGDCFSSSSFTEVFGRKSARLMASGVYGQSAGANDSGYDGDEPLGSMKEMEAQTIGDLLPDDDDLMSGIIDGFEYTGLSNQDDADEDIFYTGGGLELEHDDSNNVDKFRDVSFKIQLSEKHSIDKHHSRALIVKNINPGIEGSDLRALFQQYGDVQTFDTSCKSHGIVTVSYYDIRAAQDAVRAVHNKPLGLMKLDVQFSLPKENVPNKDPNNGTLVVSLIDSSISSHDLLQKFSVYGDVKEIYKSPTSCNKKFVEFYDIRAAQEALNDLNKGEISCSQIKVEHSFSGGAGSCFAEQYSGEQKQNAVAHQLKNSPPGTIGKLDTKSWDSSTVHNLYSPVRPQHDKSQHGFSVNPPQKLSSPIRIESTQQHSNQTAFGEHSGSLGHGNFGGGLQAFHPHSLPECHNGICNGYNSMTLNARNSNFRFTEGIDYNNHKVDHSDLHGHSSDQNEAIRVAGIGSCPLHGHHYTWSNSNGFPQSPSAPMMWPNFQQPVHMHCYPAMPPHIRRSAAHPMDQHHLGSAPNSVGGFANAHSFHPGSLESVGFPGSPQLYPSDLSVFASARGNYRETMFSAISAGFPSIQQILHATNGRNPMMHVSTSYDATNDRIRSRRHDGNAAQSENKKQFELDLDRIAKGEDSRTTLMIKNIPNKYTSKLLLAVIDENHRGTYDFIYLPIDFKNKCNVGYAFINMTDPQQIVPFYKTFNGKKWEKFNSEKVASLAYARIQGRNALIAHFQNSSLMNEEKWCRPMLFHKDGPNAGDQEPFPVGNNVRSRSGRNRPLSSGSETTKEASPSTSPN

SEQ ID NO: 275 - protein, 315 aa, Zea mays
MLQRLLQLARIAIGLNMIKSSQMVTSHWGAAFQHSHSYQDHNSEQMSSSPGTLSGPQFLWGSPKPYSEHSKSPIWRPPANGPALSSSSRTQGQGFLYSSRQASLFGSLDQHHHHVGSAPSGAPFENHFGFLSESPETSYMKQLKFGNMGNVGIGRNGGGLMLGMASHASVNPGSSLIGSLTDNVSSSFRPILSPRLGQAFYTNPPYHGPGTFGLDSSIDHARNRRVDSSVLQADSKRQYLLDLEKIRRGDDTRTTLMIKNIPNKYTSKMLLAAIDELHKGIYDFFYLPIDFKNKCNVGYAFINMVSPVHIISFYQ

SEQ ID NO: 276 - protein, 823 aa, Zea mays
MAANNNPWRVPMPPLLNVRAGFGDTSLFSTSLPVLPHEKLIFSHSSHGTPSKDDASAKMKVLADDPDEKDYKFDFDLRQIDDLLPDEDEFFAGITDETEPIGQTNTTEELEEFDVFGNGGGMELDIDPVETITVSFANSSIVDGARGNGINPFGVPNTVGTVAGEHPFGEHPSRTLFVRNINSNVEDSELRSLFEQYGDIRTLYTATKHRGFVMISYFDIRAARNAMRALQNKPLRRRKLDIHFSIPKENPSDKDLNQGTLVIFNLDPSVSNEEVRQIFGAYGEVKEIRETPNKKHHKFIEFYDVRAAEAALRSLNKSEIAGKRIKLEPSRPGGTRRNLMQQLGHDLDQEEPRSYRHPHVGSPIANSPPGAWAHYSSPTDNNMLQAFTRSPTGNGMSPIGMPSLISNAPKIAPIGKDSNRSKYDQVFSNGNQSLGAAFQHSHSYQDHNSEQMSSSPGTLSGPQFLWGSPKPYSEHSKSPIWRPPANGPALSSSSRTQGQGFLYSSRQASLFGSLDQHHHHVGSAPSGAPFENHFGFLSESPETSYMKQLKFGNMGNVGIGRNGGGLMLGMASHASVNPGSSLIGSLTDNVSSSFRPILSPRLGQAFYTNPPYHGPGTFGLDSSIDHARNRRVDSSVLQADSKRQYLLDLEKIRRGDDTRTTLMIKNIPNKYTSKMLLAAIDELHKGIYDFFYLPIDFKNKCNVGYAFINMVSPVHIISFYQAFNGKKWEKFNSEKVASLAYARIQGRSALISHFQNSSLMNEDKRCRPILFNPNGQDSVNQEAFPINGICIHMPLEDDCLDNEENKSLNEKTGENSTDIAGSL

SEQ ID NO: 277 - protein, 847 aa, Zea mays
MDRSSDSSNPPGLAVPAASKPPQMAANNNPWRAPLPPLLNARAGFGGDTSLFSTSLPVLPHEKLIFADSSHGTPPMDDTLTKMKVLANDPDEKDYKFDFDLRQIDDLLPDEDEFFAGITDETEPVAQTNTTEELEEFDVFGNGGGMELDIDPVESITVGFANSSIVDGARCNSINPFGVPSTVGTVAGEHPFGEHPSRTLFVRNINSNVEDSELRSLFEQYGDIRTLYTATKHRGFVMISYFDIRAARNAMRALQNKPLRRRKLDIHFSIPKENPSDKDLNQGTLVIFNLDPSVSNEEVRQIFGAYGEVKEIRETPNKKHHKFIEFYDVRAAEAALRSLNKSEIAGKRIKLEPSRPGGTRRNLMQQLGHDLDQEEPRTYRHSHVGSPIANSPPGAWAQYSSPTDSNMLQAFTRSPTGNGMSPIGIPSLISNAPKIAPIGKDSNRSKYDQVFSNGNQSVGAAFQHSHSYQDHNSEHMSSSPGTLSGPQFLWGSPKPYSEHSKSPIWHPPGIGSALSSSSRTQGQGFLYSSRQASLFGSSDQHHHHVGSAPSGAPFESHFGFLPESPETSFMKQARFGNMGNFGTGRNGGGLLLGMANRASVNPGSSLIGSLTDNSSTNFRPMLSPRLGQTFYTNPPYHGIGTFGLDSSIDRVRNRRVDSSVLQADSKRQYQLDLEKIHRGDDTRTTLMIKNIPNKYTSKMLLAAIDELHRGTYDFFYLPIDFKNKCNVGYAFVNMISPVHIISFYQAFNGKKWEKFNSEKVASLAYARIQGRSALISHFQNSSLMNEDKRCRPILFNPNGQESVHQEAFPINGICIHMLPEDDYLDNEDGKSLNEKTGESSTDMAGSL

SEQ ID NO: 278 - protein, 952 aa, Zea mays
MAPVLFGTQISAHFVKVSVFMALCFEFLIRLNRAHGSVETCLCVLRSGVRRSARRMPTEQRRYMPPAHFLPAESESSSFPDELRLRPERQVGLLKQGCFPEHAGRFACSPLQKLKCIGATVVDQLDIMQPHKLMDQKVPFSLDDKLLDVKLPPSSWREDQDPANQLDSFPKPLVSPLEGRRGSVNGTQYESGLFSSSLPEFFDKKSGMELEADGNSKLLNFNGGASQTRSIVQLNGERSSRILFVGNIDSNVEDSELKFMFEQYGDMQTLNASCKHHGFVMVSYYDIRSAENAMRALQSKPLRCRKLDIRYSSPKDYPLDKDINLSMVIVNLEASITNDDLHQIFGVFGEIKEIHPTSDNDHYKSIEFFDVRAAEAAQYALNRSEISGNKNKLEPSCLGGTERLMQQMSRALEHEQFGACKLGSPNSPSTCFGSVNMAPIRSTSTESGTVQVLCSRVQTPINQFREGRNFLDLPSTTISRSSPVGITPAGLQSGHHALDEHIHSLGKMNVQNKGRMDCGFQESTAFHPHSLPDFNDRLRNAMDVRHIYKGGCGHLSNQSSAHTEALGFSRTGSCPLYGHQLAWSNSNNLHQQPSSPMIWPSMGPFTNNMPSRQLMQVHGISRAPLRMLENNIPMNHQHVGSAPAVNPSIWDRRHGYAGEMMETPGFHPGSAGSMGFPGSTHLHQLETNGMFPHNGGTFMDPAMSPVHMSARSPQQRGHIFHRRSNVAPIPSSFDSAGERMRSRRNDSNVNQSDNKRLFELDIERIVRGEDSRTTLMIKNIPNKYTSKMLLAAIDESHRGTYDFIYLPIDFKNKCNVGYAFINMINPDNIVPFYKTFHGKRWEKFNSEKVASLAYARIQGKSALVAHFQNSSLMNEDKRCRPILFHSDGPNAGDQEPFPVGSNVRSRPGRSRILSWEQNHQDIVSDHTKGGTPSRAGGTPGYIATDTDHTAVD

SEQ ID NO: 279 - DNA, 2856 bp, synthetic construct
  misc_feature 1..2856: note = dpzm10g029750
  source 1..2856: mol_type = other DNA
atggcgccagtgctctttggaactcagatctcagcacattttgtcaaggtttcggtctttatggctctttgtttcgagttcctgattaggctcaaccgcgcacatggttccgtggaaacgtgcctctgtgtgttgcgctctggcgtgagaagatcagccaggagaatgcctactgaacagagacggtacatgcccccagctcattttctgccggcggagtccgagagctcgagcttccctgatgagttgcggctgagaccggagaggcaggtcgggctcttgaaacaagggtgttttccagaacatgcggggcggttcgcttgttcgccccttcaaaaactgaagtgtattggggcaacagtggtcgatcaactcgatatcatgcaaccccacaagttgatggatcagaaagtcccttttagcctcgacgacaaattgttggacgttaaactgccgccctcaagctggagggaagatcaggacccagcgaaccaactggattcgttcccgaaaccgctcgtgtctcctctggagggacggcggggatctgttaacggcactcagtacgaatcgggcttgttttcttcctcgctgcctgagttctttgataaaaaatccggtatggagcttgaggcagatgggaacagcaaacttttgaattttaatggtggtgcctcgcagacgagatctatagtgcagcttaacggagagagatcgagccgcatcttgtttgtcggcaacattgactccaacgtcgaggactcagagctcaagttcatgtttgagcaatatggtgacatgcagacacttaacgcttcatgcaagcatcatggattcgtgatggtttcctattacgacataagatcagccgagaatgctatgcgggccctccagtccaagccattgcggtgtagaaaattggatatcaggtactctagcccgaaggactacccgttggacaaggatattaatctctctatggtcatagtgaacttggaagcttcaataaccaacgatgaccttcaccaaatttttggagtcttcggtgaaatcaaggagatacaccctacgtcggacaacgatcactataaatcgattgaattttttgatgttcgggcggcggaagccgcacagtacgcgttgaataggagcgagatctctggaaacaaaaacaagctggagcctagctgcttgggtggcaccgaaagattgatgcagcaaatgtccagggcactcgaacacgaacaattcggtgcatgtaagttggggtctccaaattctccttcaacgtgttttggttccgtgaacatggcccccatacgctcaacttccacagagtctggcacagttcaggttctgtgttcgagggtccagactcctataaatcagtttcgcgagggtcggaatttcttggacttgccgtctacgacgatttcacgctcctctccggttggcatcacacctgccggccttcaatctggtcatcacgctttggatgaacacatacactctctgggcaaaatgaacgtccaaaacaaagggagaatggattgcggtttccaggaatctacagcattccatccgcacagccttccagattttaatgaccgccttcggaatgccatggatgtcaggcatatctacaaaggtgggtgcgggcacttgagcaaccagtcatcagctcataccgaggcactcgggttttctcgcacagggccttgtccgctcccaggccatcagctcgcttggagcaattctaacaacttgcatcagcagccttccagcccaatgatttggccttccatgggtccctttaccaacaatatgccatcgaggcaactcatgcaggttcatggcatttctagggcacctctgagaatgcttgagaataacatacccatgaaccaccaacatgtcggttccgcgccggctgttaacccatctatatgggataggcgccacgggtacgccggagagatgatggaaacgccaggatttcaccctgggtccgccggctccatggggtttcctgggtccacacacttgcaccagctcgagactaatgggatgtttccgcacaacggtgggacctttatggatcctgcgatgtctccggtccacatgtcagcgcgctcgccccagcaaaggggtcacatctttcacagacggtctaacgtggcacccataccttcgtcctttgactccgccggtgaaaggatgcgctcgagaaggaatgacagcaatgttaatcaatcggataataagaggttgtttgagttggacattgaaagaattgtgagaggggaggacagcaggaccaccctcatgataaaaaacatccctaacaaatacacctcgaaaatgttgttggcggccatcgacgagtcgcacagggggacgtacgatttcatttaccttcccattgatttcaagaacaaatgcaacgtgggttacgcatttattaacatgattaacccggataacattgtcccgttttacaaaacctttcatgggaaacgctgggaaaagtttaattccgaaaaggtggccagcttggcgtatgcaaggattcaagggaagtcggctttggtggcccacttccaaaacagctctctgatgaacgaggataaaagatgtagaccaattctgttccactccgatgggcccaacgcgggagaccaagagccctttccagtcgggtcgaatgtgagatcacgcccaggacgcagccgcattctgagctgggagcagaatcaccaagatatagtgtcggatcacacaaaaggaggtactccaagcagggccggtgggacgcccggttatatagcaacggatacagatcataccgcggtggac

SEQ ID NO: 280 - protein, 952 aa, synthetic construct
  REGION 1..952: note = dpzm10g029750
MAPVLFGTQISAHFVKVSVFMALCFEFLIRLNRAHGSVETCLCVLRSGVRRSARRMPTEQRRYMPPAHFLPAESESSSFPDELRLRPERQVGLLKQGCFPEHAGRFACSPLQKLKCIGATVVDQLDIMQPHKLMDQKVPFSLDDKLLDVKLPPSSWREDQDPANQLDSFPKPLVSPLEGRRGSVNGTQYESGLFSSSLPEFFDKKSGMELEADGNSKLLNFNGGASQTRSIVQLNGERSSRILFVGNIDSNVEDSELKFMFEQYGDMQTLNASCKHHGFVMVSYYDIRSAENAMRALQSKPLRCRKLDIRYSSPKDYPLDKDINLSMVIVNLEASITNDDLHQIFGVFGEIKEIHPTSDNDHYKSIEFFDVRAAEAAQYALNRSEISGNKNKLEPSCLGGTERLMQQMSRALEHEQFGACKLGSPNSPSTCFGSVNMAPIRSTSTESGTVQVLCSRVQTPINQFREGRNFLDLPSTTISRSSPVGITPAGLQSGHHALDEHIHSLGKMNVQNKGRMDCGFQESTAFHPHSLPDFNDRLRNAMDVRHIYKGGCGHLSNQSSAHTEALGFSRTGPCPLPGHQLAWSNSNNLHQQPSSPMIWPSMGPFTNNMPSRQLMQVHGISRAPLRMLENNIPMNHQHVGSAPAVNPSIWDRRHGYAGEMMETPGFHPGSAGSMGFPGSTHLHQLETNGMFPHNGGTFMDPAMSPVHMSARSPQQRGHIFHRRSNVAPIPSSFDSAGERMRSRRNDSNVNQSDNKRLFELDIERIVRGEDSRTTLMIKNIPNKYTSKMLLAAIDESHRGTYDFIYLPIDFKNKCNVGYAFINMINPDNIVPFYKTFHGKRWEKFNSEKVASLAYARIQGKSALVAHFQNSSLMNEDKRCRPILFHSDGPNAGDQEPFPVGSNVRSRPGRSRILSWEQNHQDIVSDHTKGGTPSRAGGTPGYIATDTDHTAVD

SEQ ID NO: 281 - DNA, 1023 bp, Zea mays
  source 1..1023: mol_type = unassigned DNA
atgtcctcgtcttcggcgcaccagaaggcgtcgccgccgatagaggaggaagcgacggagcacggacccttccccatcgaacagctacaggcatctggaatagctgcacttgatgtgaaaaaactcaaagatgctggtctctgcacagtggaatctgtagcatactctccaaggaaagaccttttgcaaattaaagggattagtgaagccaaagtcgacaagataattgaagcagcttccaagttggttccactcggatttactagtgctagccaacttcatgcacagagacttgagatcatccagcttacaactggatctagagagcttgatcaaattttggacggtggaatagaaacaggatctatcacagagatgtatggtgaatttcgctccgggaagactcagttgtgccacactctctgtgtcacatgtcagctcccattggaccaaggtggtggtgaaggaaaggctttgtatattgatgcagagggtacattcaggcctcaaagaattctccagatagcagacaggtttggcttgaatggcgctgatgtactagagaatgtggcttatgccagagcatataacactgatcatcaatcaagacttttgctagaagcagcctccatgatggtagagaccaggtttgctctcatggttgtggatagtgctacagccctttacagaactgatttctctggtagaggggagctatcagcaaggcagatgcatctggcgaagtttcttaggagccttcaaaagttagcagatgagtttggagtggcagtggtaatcacgaaccaagtagtggctcaagtggatggtgctgcaatgtttgctgggccacagatcaagcccattggagggaacatcatggctcatgcttccacaactaggctctttcttcgcaagggaagaggggaggagcggatctgcaaagtaatcagctctccctgcctggctgaagctgaagcaaggtttcagatatcatctgagggtgtcactgatgtcaaggactga

SEQ ID NO: 282 - DNA, 906 bp, Zea mays
  source 1..906: mol_type = unassigned DNA
atgactgggcgcccgccgctctacgccaggtctccggctcgtcgccaggccttcgcgagcaacgagcacccaccaccaggtaagcgcaccctccctccctcccttccggcgatgaccgggcggccgccgccctacgccaggtcttcggcccgtcgccaggccttcgcgggcgacgagcatccaccaccagctctgctgggtcctccgccgctggtcgacccgagcgcaggccgaggagtgtgcttgatgagcacctcatggagggacaagcagcgcccggaactcgtcaatttcgtcgccacgttcctcgctaccaacatgtaccgcctcaatttcatgtcgctttctccggacttcatattcaacaatgggggcttatcggttgctttcgccttcgagaccgactggcttcctgaaagggaagctgcggtcttcagcagggtgactacactgaagaggcagttcaagtacctctatgtcgttgtcgtcgtccgctcggcagagcagaatgaatcatttaatcagtcatatttcaagtatggcatggagcttggctgtccaacattcgtccctgtttgtgatccagcgatgggattcgagaagattgtaaggatagctcatgctcgtggagtctgcaagcagaaagacaatatcgcaactatgagaattgagcgtgagcaagctgttcagtgcatggatgcgtttttacgagtgctcacctctattcctggtattgacagtcatgatgcaaatgcccttgcccaagccattggctctatcgaagcaattgcaaaagcatccaaggaattcattttggaaaacaccgacctttccactgaaaaggcagagagaattgttaggttcttcagggatccacagtacttcttaagccctaaacttaattaa

SEQ ID NO: 283 - DNA, 1044 bp, Zea mays
  source 1..1044: mol_type = unassigned DNA
atggcggacgccgccgacagcagcatggcgctggtgcattcaagcctggcagactccgtgctgacgtcgccgcggacgttgaggcaggggcagaagtgggaggtggagtatgcgcgctacttcggtacgccgcggcgggaccccaccgcggctccaccatcagggctccgctacatcatgcggggcgtccaccgccaccagggaacctggatccccgcctcatgccccgcttctctctgcgtctgccaccctagcctcccctccgcggtccccgtcctcaccatctccatcggcgacgtcgtcttcgaggagcactttgtgtcgattctcaacttctcttggcctcaggttacttgtgtgacgcagtgccccatcagaggtagcagggtggtattcgtgagcttctgtgataagtttaaacagatccagaagtttgctgtacgtttcccacagccctgtgacgcagaatcgttcttaagttgtgtggaatgctcatgcggaagcagcggaaccatggacatcataccatttggaagtgattatgtgtgtgaagattcatcagcatctgaatatattgtttctaatggacttcatcacaggctggatgatgcttcaaaccttgaggagcaatgttttgaccacacaatagatgaaccaccaatgaactaccacgaggaaacagaccagcatgttcttgaacctctcagtgctagcaacactagtaacaactctgctttccctcctagtttcaaccaaatgctgaaaagttgttcaattgattatgaccaagaggaaccctgtccattggctgcatcaaaccatgtccttcaagaggtgtatgtgctggatacttctcatgatgttgccaatgaagaaaggactgctggtaaaggaatggatgctgctgaaggagttgatgccagtatattaacatatgacctaatggcacggataaagacatatatggctgatgaatcctttaatgatatgttgctcaagcttgataaagccattgatgaacttggtggtgacatgtcgctgtag

SEQ ID NO: 284 - DNA, 2088 bp, Zea mays
  source 1..2088: mol_type = unassigned DNA
atgagcgcctgcgggggcaccatccccgcgtcgcgcttcctgcgccgccgcgccgccgtgcgggacctgggcggggacgcggccgccggcgacaccgacgccttctgggccgccccgccccgcctctacgacttctcccagcagcagcagcagcagcacacggcccaggccgcgcggcgatcgccctcgccggcgccgaccagcccgtgcctcctcgcccggaagcggcaccagcagtccccgtcgcctcctccatccccgcggcgctcgccttcgtcgcccgggacctgcctgctctccgccctgcaccgcacctgcgtgggctggggcgtcaccaggcgcgccgagtaccccagacggcaccgcccggtttctcccgcggcttgtgggcaggttacggggatgcacacgcacgggcgggcggcggctcggtgcgtggacgaggacgaggagagcaccagcaagaacagcaagtgcctgttggccgtgggcaagaacgagctggaggaggaggtgggtcaagaccacgagagctgcctgcaccgccgccgccgcgccaagaaggccccgtgggccgtcaaggaggagcaggagacgtcaggtgaggcggcggaggagggcgccaagcgcgccaagaggaccccactgaagcatgaggcggcggcggcggcggagagcaagcccgccggcgccgccaccgccaccgccactcccgactccggctcgccacgcggcaacggcaaggtcgaccggtgggcggcgtggcggtacgcggcgggcgaggcggcgctggccaacatcctgcgcgagcgcggcgccaccgccggcaatcccacgccgcgggccgtcctgcgggcgcaggcgcgccgcttcatcagcgacaccggcctgctcgacaacctcctccgccacgtcgccgacaaggtccccgccggcaccgctgaccgcgtccgccgccggtataacccggccggaggcatggagtactggatcgagccggccgggctggcggccgcgcggcgggaggccggcgtcgaggacacgtactgggtgccgccgcccgggtggaagcccggagaccccgtgtcgccggaggcccgcacgctcgaggtgcagaagcaggtggaggtgctcgccggggagcttgccgtcgtaaagaggcaaatggagcagctcgactccaatctggtgcaaatgagcaaggaagcctacatctcatggaaggggtatgactgtatggtcaaggccaatggcaagctggaaaaagaggtgctgtccttggaggagaagtatgagactgcggcacaggtgaatggggagctgaaagagctgctgctgctactgaaggataagtatgatactgtgcttgagaagaatgagaaactggagggccagatggttgctctgtccacttctttccagtccatgaaggaagagttgctcctgcagagaatggaagaacaccctctgctgatgctagcgcaagagccttgggaaggtgacaagcgagaagccggtggtgcgaacaaggctttggtggtgtgtgcaggcgaccagctggccggcgctgatgccttcgatggcagcttcagcagcaaccacagtgcctatggtgacgagaagatggtgctgaggaaacgtatctgcgtgcgggagggagcatgccagtggcctaggtctgctacttccagtggcgctacggctggcagccctggggacctgccggagccgctgacaccgggtgcggatctgatcgtcactgacttcgacaccatgatcgatagcctcgcgctaccgtccatggaggagtacctacaggtcgatggtctccccacgccgacgtctgcctcgtccaccaccgcatctcccaagctccagctcctcccctcaccagcctcgccgagccaggtccagcctctgccgtcaacaaccatggtcgtgggcgacttcaacatgcagctccggcacatggacacgtcgtcgtcgtcgtcatcaggaccgtgcggtgccaaggcgctgaagctcgacgccggagctggaggtggcgaggttggcactgagctggtcctggcgacccccacctactga

SEQ ID NO: 285 - DNA, 3606 bp, Zea mays
  source 1..3606: mol_type = unassigned DNA
atgggttctctcgccgatccgtacgcgctacgctgcgtctccgacctgcctccgccattccgctctatgttcaggttcagatacttcaattccttgcagagtgagtgcttccatgtatgtttcttctcggatgtgaacatggttatctcggcacctacggggagtgggaagaccgtactatttgaactctgcattctgaggctcctctcaaggttcctttcaccagattggaggttcaatttaaataaaggaactctgaaaacaatctacattgcaccgtcgaaggcgctggtacaggaaaagctgcgggactggaacatgaagctgggcccattagggatcaattgcttggagatgactggtgacggtgaattttgcaacactaaagccatccatgatgctgatttaatactcaccactcctgagaagttcgattctatgagtcgacatggtataaaaagtggtagattgggtttcttctgtgacattgctcttgtccttattgatgaagttcaccttctaaatgatccacgtggagctgcgttagaagcagttgtcagtaggataaaaatgctatcgcgacatgataacatgaaatcttttcctctggctaatgttcgattaatcgctgtttctgctactatccctaatattgaggacataggttatgctccagctaaaaatgactttctttttgagaggaaatataaatggaatatggattacagatatactgatgcaacattcaagggggaagtctgcacttattttctgttctacgagaaaagatgcaatcctgttccattttcagttggttttcataatggtggtctttgcttaaaagaccgaggtcttgttgaggggcttttcctcaagggtgatcttcaagttctatgcacaacaaatactttggcacatggcgtcaacttgcctgcacatacagttgtgataaagtcaacacagttcttcaacaaagagaagggcctatatgttgaatatgagagatccatggtgcttcagatgtgtgggagggctggacgtccaccattcgatgatactggaacaattataatcatgacaagaaaagaaacggttcatctatatgagaaccttctaaatggatgtgaaatggtggagtctcagttgctgtcatgtgcggtggagcatctaaatgcagaaatcgttcagttgacagtatctgacatcattctggcggttgagtggatcaagtgctcgtatttgtacatcagaataaggaagaatcctgagaactatggagttaagagggggactcctcaagatctccttgaaaagcaaattcaagatatatgtgtcgataagattcatgagttggtggagtatggactgatttggacagatgaaggagctttcgttttacaaccgctagaacctgggaggctgatggcaaaattctacctgaagtttgatacaatgaagcttatagtcaaagcttctggctattgcaggatccaactacgccgaaatgataagaagattctaaatgacataaacgctgacaaagatggtagacttctatttcatattgtcatgaagaatggaaaaaggaagaagcgtgttcagacaagagaagagaaaatattcttgctagcaaatgattgcttaactggagactctctaatccatgatttatccctcaaccaggaaacaaatgcaatatgctcaaatggatgtaggattgccaaatgcatgcgagaatattttatatacaaaaagaattacagatctgccattaattctatgatccttgcaaatagtctgcatcaaaagctttgggagagcagtccatttctgctgaaacaactgcctgggattggaattgtaacagcaaaggctctgaagactgctggagtttatagctttgagaccttggcaactgctgatgcaagaaagatagaattggccacagggcgcaattatccatttgggaatcatatcaaagaatcaatgtcatcattaccacccaaaattgacatacacatagaggaaactggaaacagacttgggaaatcgaccattactgtaacactaactcgtctatcacaggcagttaaatccagtaaacgcaactgtgctgacatggttgtggcctcagaggaagacaatgtgatcctctttcatgagaatataagcccatattctgtaaaagtttttgtgccatgcccccaaaatgcacgggtgactctgaaggttgatctaatatttgaagaatatgttggtcttgatgtccacaagaagcatgtagtaagcagggaagatggtttgtacgtgaccaaggagcatgggatagataaccttgaacctacgtacaatatcccttcagagatttgtttggttagctccaggacaactcgaacaagccgatctcaatctcacactgaacagaaccctctttccaaagaggtttatgtcatagaagatgatggcgctgctgtgagtgctgtcagtgctctcgagaaagctgatgatgcagtgggaaccataaaatttaacaacttggcttcactggaggtcccaagctttgatctactgcctgaagaagagtatggagctcctggaccagcagaggcagaatgcaaaggtgccacagacagcacgatttttgatcacatacgcaaaaagtccaaagacttccccactctgatgctatcaaaatccatggattgctcatatgaacctcttatactgaagaagatgaagatatcaagggaccagtttggagtaaagcatggttgtctgcatgcgggtgaggccaccacaatggattttgatcctgttgagcctagggtctctccaaccaatactgctgagaagttccgcgggatcctgggtagaagttcagaaaggagtcgcatgctgtttggaaaaatggatagcccgtttgagaagagcgagatgctgggcacgacgccagctgaaagttctcttcggttcgcgggtggaaaagacagctcactggagaagaacaagaccctgatcagaactccagctgaaaactctctccaaattgcagcacgtggaaaggagagcaaggtgagcaaggtgctgacaaatctagataaaagccctcttgggtttgcgggtggaaaggagagcaagatgagcaatgtaccgagcacttcagctgaaaactctctccagtttgcagctaggcgtgtcagatcatctgagaagagcaagatgctgacaactccatatgaaagctctcaagcgtttttgggcgaaaaggacagcccatcggagaaaagcaaaatccttattaatagtccagttgagtatcctttcaagaaaggaagtccaggtgaaaatcctttcaaaacatgtagtccagttgaaaactccctcaaatttgcagctcaacgtgacagcccatctgagaagaggaaatcctgcatcagcaatccccttccgcccttccagcaggctgttcaatgcacaaagcaagtaggagttgcaggtcaaccctttgatattaaggaatattgcaaggaaatattgaggagcagaaatgacagtcaaggaggcgatccttttgctggttacaagagtatcttttcttttctatga

SEQ ID NO: 286 - DNA, 1788 bp, Zea mays
  source 1..1788: mol_type = unassigned DNA
atgacgggagcaggcatgaagcttaagatcaacaaggcatgcgacctcagctccatctccgtcctccctccccgtaggaccggagggagtggcggcgcaggttcctcggccgcggccgcggctgtggcggcggggtcgcagcagcggtcccagccgctgtcgcagcaatccttctcgcagggcgctgtggggagcggcggcgcgtcgtcgctcctgcactcgcagtcgcagctatcgcaggcctccctcgacgagaacctcctcacactccacctcgcttcgcccgcgcgcgaccagggattcaggttgcatgacgactcatcaaagaagatgacatcgttgcctgtcacctcagcttcttgtgtgcgagaagaatctcagctgcaactggcaaaaacatcaagcaaccctgtccatcgatggaacccttctcttcctgatagtagatgcagtggtttaacaggtgtggttcctgctgaggatgttgagcgcaaatttcagcatatggcaagttcagtgcataaggtagggatggtgctcgattcagtgcaaaacgacactatgcagttaaacagagccatgaaggaagctgcactagattctggaagcatacagcaaaagattgttgtcctcgacacttcgatgcagaaaaatcttaagggacaaggtgatctcaaagtgcttgttgagagcaacacaaaaaacattgctgatcagctggctgttctgaactcccactccaacaaactggttgagatatcctcagccctttcagtcttgccgaaacaaatagaaagagatttaaagcaacaacagagtgacatcttcagaatttttagaaacaacatggaggagattgctagagctgtcaaatctctcaacagtaagatcgatgcaatccaaatgccaacagagcagagatgcacaaccaatggaaggcccctgatgaaccaactaccagtcgatagaaacgaaaggcctcaggtgaaccaaacaccagaggtaacccgggtgagccagacaacagtagcaagcttagtgaaccaagcaccagcagcaaatggaaggcacctgatgagcaaaacaccagcagcaaatgggaaaagtgtgatgagacaaacaccagcagaaaatggaaggcacctagtgagccaaacacctgcagcaaatggaaaaactctgaagagacaaacatcagtaacaaatggaatttccctgatgagccaagtaccagcagcaaatgggaaacctgtggtgatccaaataccagcaccaaaaggaagacctatgatgaggcagaaaacagcagaaagcggaaggaccgagatgaacgaaatacccgtagcaagtggacgaccccatacaaacaaaatacccatagcggaagtgcatcccgcacctttggtgtgccctgcaaagcaggtagcaacagacccgaagcccaaggtagacgaggaaaagctgaaagcgcttccccaaaagctaactagttctagatccagggtggcacctaaacaggaagaggcggcaaatacaaaggtcatcagccgggcagcggcaactgagaaggtggtgatattcatcgacgactctgacgatgacaacgacgtccgtgcttcctgcgtgatcctcaggccctcgggatcaggcagcttaggtgagagggaatgcgacctgatgaaggtgggcgcggaggagagccaggagatcccgcggagggccaggaagcggaggagaagagaaatgcaggccactgtgggtgtggcatgtatgccgctgcctgcctga

SEQ ID NO: 287 - DNA, 1809 bp, Zea mays
  source 1..1809: mol_type = unassigned DNA
atgttctactcgcatcagcttctcgcgcggaaggcgccgctcggccagatatggatggcggcgacgctccactcgaagatcaaccgcaaacggctcgacaagctcgacatcatcaaaatctgtgaggaaattttgaacccctcggtgcccatggctctgaggctctctggaatcctcatgggtggcgtggtgatcgtgtacgagaggaaggtgaagcttctctacactgatgtctctcggcttctgactgagatcaacgaggcatggcggatcaaaccggtcacagaccccaccgtcctccccaagggtaaaactcaagccaagtatgaagcagtaacactgccagagatcaatatggtggtggaacagcccatgtttttctcagagcctgatggtgccaagttccgacgaatgggattggaagatctggatgaacagtatgttcaagtcaatcttgatgatgatgacttctctcatgctgatgatcgtcatcaagctaaagcagtgaatataaccctggtcgataattttgagtctgggcttgcagaaactgatttattcaatcactttgagagatttgacatagcagatgatgagaccacagtcaatatcactcctgatgagtacccacaagttccaagtacgctgattccgtcaccacctaggcaggaagacattcctcaacaagaagaaccgtactacgctgccccctcccctgttcatggagaacctcaacaagggggaccagaggaccaagaggaacagaagatgaagcaaccaccgaaagcatcaaagcggaaagcacgttgggaagtcccacgagtaattatggacaataaccagatgatgatcccaggaaacatatatcagacatggctgaaggatgcatcaagccttgtctcaaaaaggcgtaaacttaacagcaattttaattttattcgatcaaccaagataagtgatctcatgcacatccccccggttgctctaatatctcatgacaacttgttctcagaattatgttatcctaagccacttatgcagctctggaaggactgcactgaggtcaagtccacaaaagcttcttcaggagggcagcgatcatcatcacaagaaccacaaccgaaaaactcaccacctcaggctgggggagagtatgagatggaaacaggtggtctgccgatggatttaacagatggcattgaaaaactcagggcaaacatgagtgcaaaatatgacagagcttacaatattcttcacagtgaccatagtgttactcctggaagtcctgggttaagtcgcaggtctgcttcaagctctggtggctctggatcggcgtttatacaattggatccagaagtacaattgccatcaggaagtggaaggtccaaaagggggcagcattcatctgcaagaagcttggggaatcttgatactgttgaggaagattttccactggagcaggaagtgagggacttcaagatgagaaggctttcagattatgtgccaactcctgacctactggaagaaactgaaccgactcaaaccccatatgagaggcgctccaatccaatggacaagatcacagaaacaatccagtcgcatctcaaacttcatttcgataccccaggtgtcccacaatctgaatccttaagtcatttagctcatggaatgaccaaagccagggcagcccgactattctatcaaatagctgttttggcaacttgtgattacatcaaggttactcagctggaacggaaaggagatgaactgtacggagacatcttgatctccagaggattaaagatgtga

SEQ ID NO: 288 - DNA, 1491 bp, Zea mays
  source 1..1491: mol_type = unassigned DNA
atgagatcgggttttaacgaggaccaaaagttttcttttagaagctctgcttgtaagatgatcagaacgctggtttcacttatgagaaccttggacccaatgcctgaggagcgaaccattctaatgaagcttctatactatgatgatgtcacacccgaggattatgagcctcctttcttcaagtgttgtgctgataatgaggccataagtatatggaacaagaaccccttgaagatggaagtgggcaatgtcaatagcaagcaccttgtgttagctttgaaggtcaagagtgtccttgatccatgcgatgatgacaatgttaacagcgaaggtgatggcatgactgtggataatgagtctgatcatgatgatgacttttctgacactgaggttcatccaccaaaggcggatcattacatcatagctcctaatggtaagcatgtcctcagcaatgtttgcatttgctgttttggaattattaatagaagttttctcacagaaggaaaagacaaagatcaggacactggtactatttcagaagatgatactcaagatactgctcatgaggaagagctaacttcccaagtgaaggagtggatatgctcaagggacagcggaacaattaatgtttcagatgtcctttctaacttccctgacatatcaatggaattggttgaagatataatggacaggctacttaaagatggtatactatccagggcaagcaaagatggttatacggttaaccagaaggctgatccaaaaacaccacatataaagaaggaggccatcatgccagatgtatcaccaactaatgtaaccaaacacaacaatggggatctgctatatatgaaggcattatatcatgcacttcccatggattatgtgacaatagccaaacttcaaggaaagctggatggggaagccagccaaaatacagtccgaaagttgattgacaagatggtgcaagatggatatgtgaagaattcagccaaccgaagactgggcaaagctgtcattcattctgaatctaccaacaaaaggctccttgagataaaaaagatactggaagtcaatgaaggcgaaaagatggccattgacaccaatacagagcatcctgagcctgagcacaaagaccttctgagagtctatgaagtgggagatggctccactatgggttgcctccactcaattggatctgatcttactcgtactcgggagctgccagagctgcaacagaatgtgtccatgcagagcgggcaagaagcttccacagtgggtaaggattccagcaggactccaacaagtgtgcgtgagctggctgtacctgtttgttccctggaaagtggagtgcttggaaagagaatcaaaaggtctctaactggtggaaatgagatgcagtctacccaggacaagcgatccaggaaggctagcatggtgaaggaagcaatactccaacatgtcaagtgccaaaaccctcaggctcagtga

SEQ ID NO: 289 - DNA, 636 bp, Zea mays
  source 1..636: mol_type = unassigned DNA
atgtctaagaagagggggctttcgttggaggagaaacgggagcaaatgcttcaaatattttatgagagccaggaattctttctgcttaaggagctagagaaaatgggtcctaaaaagggagtgattagtcagtctgtgaaagatgtggtgcaaagcctggtggatgatgatcttgtcttgaaggataaaattgggacttctgtgtacttttggagtcttccaagttgtgctgggaaccagctgaggaatacttacaacaagctggaatctgacctttcaaactctagaaagcgttacatggaccttgttgaacacagagataacttgaaaagaggccgggaagactctgaagagagggaagctgctttggaggagctgaagactgtagaactacaccataagaaactcaaggaggaactggctgcatatgcagatagtgatccagctgcagtagaagcaatgaaggatgctactgatattgctcattcagcagctaacagacaacattttcactttgcaacaatggtgttcaaccacattcccagaagcaaaagaacaactggaacatatgtacagggaggtatgtttctgtcttgttctgttttgaccttcttgtgtttgcagtatgctgcctga

SEQ ID NO: 290 - DNA, 381 bp, Zea mays
  source 1..381: mol_type = unassigned DNA
atgccgattttcgcattagtggattggaacccagcagggcttgctatactgtgcacttacaaatacggaagcatatcaatgggcctagagtcatacagatatgcttgcaacgtgaaatggctcggggtgagaggaggtgatctgcatcttatccccgaggacgcgtttcaagagctgaagccacgtgatctgcagattgccaaaagcttgatgtcgtcaaagttcctgcaggagagtcacagagctgagctggcgctgatggtggagaggggcaagcgtgcagacatcgaagccctctactcccacgggttcgatttcttggggaagtacatcgcgagaaagatccgcagggcgattacatctgatgatggaatgatgtaa

SEQ ID NO: 291 - DNA, 798 bp, Zea mays
  source 1..798: mol_type = unassigned DNA
atgccacctcgtcgagccaatgaaaactttcttgaagcctatgaagttattttaatattggatgaccgtgaaaaattcgggtctcgttcaagaaaagttgctgataacatttgttccctgagccattttgctgtggatgtcaggcaattgcctgtgggagatggtatttggattgcccgtcataaggaagatcacacagagtatgttcttgatttcattgttgaaaggaaagaggttatggatttagatggctcaattgaagacaaccgatatagagatcagaaattaaggatgaagaaatgtgggctgaggaagttgatatatcttgttgaaggtgatctcaaccgtgcaccaaagagggttaaaacagcctgtttcaccactgagattctcgatggatttgatgttcagagaactactgggtttgccgatacccagaagagatatgttgatcttacacgttcggtaatagcatactatgatgcaagtttctcgatcgttggtaaagcttcccctgtttgcccaacctacgatgacttcaagagaaagtgttatgatcttaagaagaaaacagtgagcgacatatttggctgtcagcttatgcaggtaccacaagtaacagaagaagctgcacaagctgttgtagagctctatccaacccctttgttactggcaaaggcatactctatacttggtggcgatacctctgcacaagagaagatgctaaagaagaagaacgagatggtaaatgcaggagcaagccgaaacatatttcaccttatctggggtgacggatga

SEQ ID NO: 292 - DNA, 897 bp, Zea mays
  source 1..897: mol_type = unassigned DNA
atggcggcggccggtggcggaagggaagccaccacatccggctgtggtctcaagcgccgctacgcaccacacgaccaggaggaggagacgatgaatcaagatcagccttctaaggaagatcggtgtgggcgaatttggagtgggatcgacttgctcaaggacgtcactgaaaacaagcatgtcctacctactggacttgaaggcattgacagacttcttgggggcgggctgcgccaaggtcagctcacagaggttactggaccatcatcttctggtaaaacacaggtttgtctacattctgcttcacatgctccagtgaagcatacgggtgtggttatgtacttggatactagtaattctttctctcctagtcgtattgccaccataattgatggaactaacgacctatctgatcaaaaaggttttgacttgctgtctaaggagaggctcaagactgtgatgcaaagcatcatctgcgagtctgtgtttgatatatttggtatgtttgaagtactacatcaacttgaagtttctctactgaatgaaaaggtaataggtgatggcaggagaatttgcttacttataattgactcaatatcatccttacttgctcccattattggaggcaagtatccacaagggcgatcgatgatgatatcactggcgatgatcctaaagaagttagcctatgagcataatctagctgttctggtgaccaatcatatggtttcagctggcaatggtgctgtcaagcctgctcttggtgagagctggaaatctgttccacatgtccgcctgatgatatctcgtgaacatagtagtaatatctgcacgggaactgtgctgaagcacacactactggcttctggccgtactgcaaaattcgtgctgccctga

SEQ ID NO: 293 - DNA, 2604 bp, Zea mays
  source 1..2604: mol_type = unassigned DNA
atgcaaaagcactcggggcttcggagcctcgaggggttccgatccctcgttggatccacctcgacagccatgaaggtcgcgaaccccaggccctccccggatactgggggtatttcgtatgggagcttcgccaaccttaagatcacagcagagaaattagtcaaggagcaggcttcagtgaagactgatctagaaatggcgcatgtcaaattgagaagagcaacagaacagataaacattatagagggaaaacttcaacaagctttgaatgaaaatgcaaagcttaaggtgaagcagactgaagattcgaagctctggcagggattagattcgaaactctcctcaacaaagaccttgtgtgatcaactgactgaaactcttcagcagctagctagtcagacagaacaagctgaggaagacaagaagttttttgaggagatgcttgggaagaattccaaagctctagatgaattcaactgcttgttgcgtgatttatcaacaaaactggagtatgcggaacaaaagataatttcagggagacaggagatgttgcagatcaaacaagagaaagaagagatggatcgaagttacaagggacaactgtattcaaatgatactacgataaaggaaaaagattcgctcatcaagcagttggagggttcacttgatgataataaatcccgcttgatatatcttgactcccgcttgcaatgcatggagcaagaactgaagctaaaagatgatgtttgtatcagcctgaaaggaaacctagctagcagtgaaagtgaaaagaacagtttggagcttatgaataagggacacattctggaaattaaaaaactatgccaggacaacaaggatcttaatgaattgtttagcagcttcatggttaaagtaactgagctagataaagaacatgcctctatgtcaagtcatgtgtctaggctgatttcttcatttgaaagattctatgaaatggcccaagaggagaaaatgctaatggcaagatcttctaaggataaatttgaacatcttcaaagccagtatgtagatttgacatcagaaaacaatgctctcaaaactgaaattgaagaactgaagtccagactcatagagttgcagagaactcaagaaattgttatggttcaacatgttgaagaatgccaagtggctgaagataagatcagaagattagagtctgaagctgaagtttctgcctccaacataaatcagttagaaaaattagcttcagaactacaagggagaattcagaagttactagaagattctacctttgctgaaaatcacaagcaagagttgcttcaaaagattttgaagctagaatcagataatcaggaactcctaggacaaatgcagtccattatggaagagaaatcaaataatgctgaatctctgcatggagagataactaagcgtgaccagcaggttgatacacttgagaatcagatcaaccagcttcgtagtgttctggatgagaaggagcaactctatctttgttctgtacaaaaagagaagactttggaggaacagaaattacaggtcgaagcattgctttctgcaacagagtgcaaacttagtgatgcaaaaaaacagtatgatttgatgcttgaaggcgaaaagatagagctatccaagcatttgaaagagctatctctcaaaaatgaccaggcgatcaatgaaatccgtaagaaatatgaacttgaaaagattgaaattactaatgctgaaaaagaaaaggcagaaaagctcataagggaaattgaaaacaaatgcaacgaaaagatatcacagaacaagcatgattctcagaggtatttgatttgccttaaggaggaacatggcacaacggtggcgagaattcagcaggataatgagcataaagagtcaactctccgggcttatcacaaagaagaactgcagcgcattcaatctcaggctgagaatgaaatgagggagaggttgtcattgctcagaaaagagcatgaagttcaaataaaatcactaaggatgcatcatgaggaagaatgccagaggatgcaggaggaactggagcttcagaagtccaaggaggagaagcaaagagcattgttacaattacagtggaaagtaatgggagaaagtcaacgagttgatcaagaagtgaactctaagaaggaatactctgtttcgtcgattaggaggagcgacccatatggaagaaaagaacaagaggtccagttggtaagtccggagaccaatcggaaggacgtaaacttacctgggattttacaatcaccaatttcgaacatgttgagaaaggtagagaaagtgtctcaggatattcctaaacatagaaaggtaacccaccatgaatacgaagttgagacagcaaatggaagaatcacaaagcgcaggaaaactaggagcactgtcatgtttggtgaaccgaactctcagaaaccattgcataatactactgacaaagatgttaaaaaactaaaaaaggttcctacaagatcccgtgcacatcctgcaaacattggtgaattattctctgagggttccttgaatccgtatgctgacgacccttatgcttttgactag

SEQ ID NO: 294 - DNA, 2037 bp, Zea mays
  source 1..2037: mol_type = unassigned DNA
atgaggcgccggaacctaattgtgcattctgattccgacgaggacgacggcgagggcatgaccaccgccacaacccccgcctcagtttcagcttccgtcgctagcggcggcgtaagcggcagcggaagcgtcggccggccctcgccccaaaacctcagccccctaccagtccccttcccgtcactctcgctatcttctgcccccttcgtcatctccgatgacgacgaggacgtcgacgagatcgtggaccctgacggggactctcccatcgttgacgcccctgaggtcttctccccgccagctcctcccgcgctccatgctcccgctcccgctcccccttcccctccccctcctatcactaccccgtcccagaccccaatcccgactccaccttcggcacggaccccgaccccgactccgccttcggcgcggaccccgaccccgactccgccttcggcgcggaccccggcctcaatagcgcctccgcacccgtccccgctgagcggccggttgcgcccggtggacgagttcctgcggcggctcgggttgcttctgcggccggactggctcgagtcctgcgctgcggggattcccggcttcgacggcctcggtggtgttgaggcgcaggccaggcggtgcttcgagcagtttctcttcgccgatatgaactcttgcggtgctggggtgctgccggagggcgtcgggggcatgcacgctgagttccttgatggccccttcgtgcttcaggttgatgaagttgtcaatatttcagttcctttaaaggaaaggtatcgtgaagcaccggcaggacccaaaaggtgtttaaaactatcaatgacagatggcatacgacatatatttggaatggaatacagacccatcaaagacctgacagttcttgctcctgctggtttaaagattattgtaaggaatgtacacacaaggaggggtcttcttatgctagttcctgaggctgttgagattcttggtggtgtagttgacgaattggaagcagcgcgtgccagacttgtttctgaagtaaacaaaccacctcgtggcaaaagtaaacagggtggattatctttgtcttcaagagctacgcgagctgcctggccatgtagcaccgatattacaaatggtgttgcgcaggggatctcaatgcaaagagcagttaattcctcgtatccaacaggatcaggtaatgctttccaggttggtggagctacagaaactgtggttgaagagcttgttagccctcttgtagcaaaccgtgtccaagaaatcaacatgcagggctcatatgcttctcttaccagggaaactactgaaacttctatgcatactacccatgaatatgatcccactcatatcactgaaaaaagtacagggaccgtcatggaagaacgtcctgatcctcctattctagcaaacagtgtccatgaacaaatgcagcgagtccaacctgctaacggtgcacaatcttcaaatgttggcaagatcaatcagatggaacagtctttcattctaagcggtgaaaatgaaaaaccatttacatacatatacagcatgcttattgactggggtaggcaacaggacacaaaagcctacattcaaggaaaaatcaagggtctgatcacttctgtaaaaaaatttcaatataaacaacgcaccaagtacgagctttatgtatatatagatgatgggagtttcatttcagaggccttcattgacagtgatattgtgaataacatgcttggcctttctcctggagaggttactgctgcacttgctggtgaattagagtttgcatcacccagtgaagtgaaagaaactttgaaaggatttcagaagtttttggtgaagtttgagggtatgatgcttatcgagttaaacaagaactctcctgttcctgttgttcgtgagttaaatgaaggttgctcaagttctactgcatggcttctgctcggaaggctgaaaacaatttcttctcagaagaagaccatccaaactcaggatattatggacaccactccatga

SEQ ID NO: 295 - DNA, 2070 bp, Zea mays
  source 1..2070: mol_type = unassigned DNA
atgccgtccaggcgcgcgctacggcggtctccgccgccacgacagagcccgcaggcagcggcggacgcgaaggaggcggcgagcccgtggctaccgtcctcatcctccacctcgtcgtcttcctcctcagcctccgcgctcgtcaggcgctccgccgccttctcggcggctgggccgaggggcggatcggggacgcgcgtgtacccgttgcgggacttcccgggcggggacgcggccgcgctcggcggtgcgttccgggacaacgtgcggtggctcctgaagcagtggagctgcgttccgggttccgtgtcggcgtggcgcgcgctgctgtcagacgagcggacgggcgccttagtccccgtcatcgccgtggaggagctcgcggcatcgtcgcccttgccgctctgcgatctctgtcgctgcgccggttggagccaccactgggtgtcaaagcggaagtaccatttcatcattccggcagtggtcgactgggaccagccattcagggctgatgggttacttgggcacagcgagcacctcctacatggtctgatccatagtaatggctttggtcaccttctcaccctccgtggtcgtgttggtggctccactttcctctctggctgccagatcatggatatatgggatcaactttgcacagctctccgtgtaagagccgtctctgttgtggacttgacccagaagtactctgtggacctccgcctcctgcttggagtggcacaaagcaagacttggttcactcgctgggggtactgccttgccaagggttgtttcagcgtgtctaggtccacttatactgctgcacttgaagcccttgctgccctgcctgttgattgtctccgtagtcgtcatgtccgtcgtgtggtcaccatctaccgccgcctctccagcaaacctctggttacagtccgcgagtttctcctctgcctgcttgattggaagcaccgtgagcccccgctttctcctcctcccgtgaaggcatcctcgcggctgatgttcttgctgccaaagtcatgtatgatgaagaggcccaggcagccatgtcaacgctttgaggacgtagttgacctgcttgagtgtcggtggtcaaagaagcgtctgcttagtgctgcaaatgttgttgttgcaaagctgcgagagcatgcggatggcacaaagataacacggcaagcagtgcgagatgctgcaaggggtggcatcggtgacactggtctcctggacttcgtcatcaagtccctcaataacactgttgttggtaaccacattgtgcgccgcgtgcctgaccctgagaatcgtgtgcttcacttcagccttgaggaatatgctgagcctgagccacagccacaggcagatcatgagcttgaaccagtggaacttgatgcagagaacacccctcctgcagtccgatggccaaacgcagccgaggcggagcgggatctgcgtgctgtgtaccgagcaatggtgggggcacgcagtgaagcagcacaggctgtactggactgcaagcactgggtgaaatggtggggcctcagggacgagtctgatgaccagctaaggttccttgttgagtggcgaccacagccatgggaggctactgaacttacaaggccaatgccgcctggggatattgtggtagtaccactgcatgcatccataggcgagctgcttgttgaggcagagcatgcactgagggatacatactgcttctttgagaatttccaggccgagtcactggatggcattactggggataaatgggatccggtgatgcttggtggagcagagtctggtgacaccattggtgtgcacggccacggagctgacatggagactgggctgcggtgccagggaggtgcagatgcgtgggaggtgcagtgcgtttgtggtgcacaggacgacgatggggagcgcatggtggcatgcgatgcatgcaatgtctggcaccatacacgctgtgtcggcattgcagatggtgctccggtgccaccattgtttctctgcatatcctgcagtggcgcgctaatggccgctggaccaatttctggatga

SEQ ID NO: 296 - DNA, 3381 bp, Zea mays
  source 1..3381: mol_type = unassigned DNA
atggcggcggcggacggggacgccttgatcgcggcgtttgcggtgtccaagggcggcatcgtgctcaagcacattttcctcaacgcaccaccgccggaggcgatgtgcgggtccggcggaagagaagtggagagtgatgaggaggacccgccggtgatggtgggtcggcaccccgactgccacgtgctcgtcgaccaccccagcgtcagccgcttccacctcgagctacggtgccgacgtcgacagagtctcatcaccgtcaccgacctccactccgtgcacgggacatgggtttcggggcgacggatcccacccaacacgccagtggatctcgctaccggtgacacgctgcggctcggggcctctaagagggagtataagctgctctggctgtcgcttcgtgaggcatttgagatggacgatctgatgtatatgccatcgctgcctgaggaggacaaagaggagccatatgttaaggaaccaagcagcaagttattgcctgggcacagggattcagtgaacatggagacccatcaggatacaagtgaacaaattgtgtctgaagacattgcatttccagccaaagtggccccctcagcacctccattgtctgagttccttcaacctttttttgtggaagagcattcactttcccaatttcatgagaaaagaaacggagtgacagaggaaaagttggtcgacaagaatcaaatttcagaatcttttggttcgttgatcatacaggaaatgccaggcacactgacaaatgctggaaaatcaatccagtcaggcgagcaggaggatgcctcaaacaaagtgtccaagaggtccaagttgaagtcagtcaaatcacttcgtgttgacacaggcaggagcagcgagagaagcagcactctgagccatagctttcagaagggagaccaaaatgatattgttgtatgttctcagagctgtgggacagaatgtgcggtatgtatagctttatttggtatttctgaaattgaaaaggctgaagaaaaggaagagttgattgctgaagataacgttgacatgaatcccccggccagcatgatcatggagggaaatatgaacgagagaaaacctgataattatatcccacaagatccaattggtgcaaagctgcagaagaaactaggcttattagattctgctctccctttgcatttcaaagatgatgtgttcgccgacaaggaaattccacaatggaatgttgctagtgttcatacagaatctgagcttctttcagaatatcttataataccagaagtgaagcacgatgacttgaaccatcttaacttggaggaaggtctctcaaaaagcgagaatataaacccaaataagattactgagggccctgggaactgtcagctcgaagggaccattcgtgggaatctatttgacaatttggatactgatggaattgaagaaggtgaagagatctgcccactggacaaggatgaaatcacccccaatggatcaggtaacataataatggagaggagcaatatagttttaaagcctaccatttcccaacagttgatggattctatttcccctctcaatttagatcatggcgacttttctgaaaatgagaactccatgctgaacactggagatcagatgaaattaaatgaacctgtctctgagaatcttaacccattaattccaactgatgaaaaatatctgaagagccaaacggaggagtgtatgcccatttcatatctggaattcaaagatgatatccttctggatagggaaaactcagtgctggctccgagaaagtacgaggctatgtcccctgtgaggcaggaaaatctgttctcagacaaagagaacgtgactcctgcctctaaggtgaagaccgttgttaggggagttcttggtacaaggatggataattcagtgtcagcagcaaatgcttcaaataagaataaagttcttgggtcaagggtcgataattcagtgtcaacagagaatagctcaaataagaagcaatgtgaattatcatcgaagtccaaaaaagtccacacagtagattttgatgttttctattcggataaggagaacttgactcctatatcttcaggaggcatgaaagcaaggaagtgttttcccaaggacctctcagtcgacttagaccaagatcaggaagcattctgctcagacaaggagaacttgacaccactatcttctgcagctcggaaaacaagggacatgtctggaaaccttacacgagttgaaagtgcggtcacaaagaaaagggttgttggtaggctccccttccagactcttgtgtcaaattctcctttgagacctgctagctcgcatgattgtacctgtgctgttgctagaccagctggcgttgctgctggtgacttggcgatcaagttagaagataaattgaacgatctctcatgtaatggccacgaatcaggtagtgctggagaaggcatgaaaacctggaccatggtggctaatacagacagtcttcttgatgacgagtctaggaaggctattatgctgctaaaaggcttaaaaggaactcgcctgttcataccaaggattgtgatcagggagttggattccatgaagcagcgggagggcctgttcagacggtcaacgaaggcgacctccatcctgcaatggatcgaggagtgcatggcaagggagagctggtggatccacgtccagagctcggccgacatgttcccggtagcaccaaccccgcccgcgaccccttcagcgcagcgcatcgacgaggagatcgagatcagctccggctccttcaacccgatgatggcgttgttcggccctcgaagctccgccgcgctcgcggatatgatatctcccagacccgaggaccgcgtcctcgactgcgccctcctcgtcagtagggtccggagcaacgagaaggtcgtggtgctgtcaaacagcgtcacgctcaagatcaaagccatggcagaggttagtacggtaaccacccaaacccaaccctgcctgcttgctgtgtgcgttcgaactgaacctggttgtgttgcgttgcccgcggcgcagggcctgccatgcgagggagccaaggagttccgcgagtccctcgtggacccgtcctccaggcggttcatgtgggcggccagcgccccacgggggtcggcctggtcctgcctggacgcgtccgcgctggcggagaactactacaacagccgccaccacgctatgaagcggagggttctggtggcggcgaggccctccgagtccgaggccgccaagggcctgaagctgatcctgcgtcacaattccctgtacgcgcaggccacggacgccgtcaacaagacgccgctggtatcgctggccgcggtgtga

SEQ ID NO: 297 - DNA, 1224 bp, Zea mays
  source 1..1224: mol_type = unassigned DNA
atggcggggagggataagaggcgacgagcggcgccgctcgaaggcgacgagcagcagttgcggcggaggctggaggaagcggcgctcctcctccgcaggatcaaagggcttgtgcgctggatcgtcgaagaggttgccgccggccgctccccgtctatagtgctccaccggtaccggaactattgctcctccgccgactctgcgtccccgtccccatgtgcctgcagctacgacatccccgtcggcacggacgtcctctctctgctccacaaggactaccacacctcccgcctcagtacgaatacatctaaatctttgcatttatgtgatcacactaattactttctgatgcgttgttcatgcgtagatgtgctcctgagggtgctgttcgtggtgcagcagctcctgcagcagaacaagcactgctccaagagggacatctactacatgtacccctccatcttcgtagaagtagcagttgttgaccgtgccatcaacgatatctgcatactcttcaagtgcagccggcacaatctcaacgtggttcctgtagtgaaaggtttggtgatgggctggataagatttatggagggcgaaaagaaagtgtattgtataacaagcgtcaatgctgctttctccattcctgttgacattgaggcaatcaaagatgttgttagtgttgcccactacatacttgtggttgagaaggagacagtgttccagcgtttggccaatgacaagttctgtgaaagaaatcgctgcattgttattacaggaagaggctatccagatattccaacaagaagattcctgcggtaccttgttgaactgctgcatctgcctgcttattgcttagtggactcagatccttatggtttcgacattctggctacctataaatttggttccttgcaattggcacatgatgcaaacttgttgcgtgtccctgatatacggtggcttggagttttcacatctgattttgaagaatattgccttccagactgctgcctacttcgtttgtcacctgaagataggaggaaagctgaaggcattcttgctaggtgctatttacacagggaagccccagaatggaggtcagagttggaagcaatgctgcaaaagggtgtcaagtttgagattgaggcactatccgcaaattccatttcctttttatcgcatgagtacattccccagaaaatcaaacaaggcatgcatttataa

SEQ ID NO: 298 - DNA, 1668 bp, Zea mays
  source 1..1668: mol_type = unassigned DNA
atggaggggaaggcggtagccgtcggttgcggtggcgcccgcgtcgatccggcggatgatctcaagtacatctccgggctgagcaccattctcgtggccaccatccaggaagtgaaggaccaggtctcccagatggagttcatcttctgcagccagctcttcccgcacatccaggccaagtcgaagcttgtccaggcgcatctcgccgacacgatgaaggccagtgaggttgagtggaggaagacggaggctggcctggtgaagcagctggaggaggtcagccgtggtaagatgctcgcggaggagagattgctgcaactgggcacctctcttgaggagatgaagaggaagcttgtggattcggagcaattggctgcgaggcatgaggcggagaagaaacagcttctggggaggttggaggatgaaacgaggaaaggtgaggtggtacgtcagctccaaagggagattgaggagaaggacgctgaggtggtcagggagagagaggcacatcagcggctgctgcaggaatttgagcaattggctgcgaggcatgaatctgagaagaaacagcttctggggaggttggaggatgagatggggaatggtgaggtggtacgtcagctccagagggagattgaggagaaggccgctgaggtggtcagggagagagaggcacaccagcggctgcagcagcaggttgacctgaaggataagaatctgcttctggagcagagcaagcggagggacttgattgaggattacactcagctgaagacaaactacaagcatttgaagtctcagtacacctttcttcttgggaagattgaccagcatgaaggctccaagcctcctgaggacattcctgcagatagaagaaacactgaaagtcctccaagtaagaggaaattcaaagatttggagcacacaaacaaggagcgcatccaaatccttcccaacacaagggacctgaagaatgactctgctccaggtgccaaagcccaagctgcccaacatgctagttcagtcaggagtccaatcagaaactcacaccttgccgtgccatctcgcccaatgaatccattggcaaatcattctgccaacaattcaaaactacaagcttcaaccagtgtcgccagcccatgtctaaattggagggagacccgtgcacgcaaagaacaaggtgttgctgatccacacgatgatttccttgatacacctctggaagctgtcaagaataccatcaggaaccctgcaactcccgaagaagcactggcacttgccgcctctcctcaagttatggatttcgacaattcagatgatgaaacccaagatctgaatattgcaactcaagccctccggcacatccccaatatgccagttaccaagcagcaaaacacaatatcggtacatccaccaaagaaagacttcaaatatagagaatcagtgagaaagaaagctgaccgggagaacctgaaaggtgtcgagtgcaagcaatgcaagaagttttatgatgctgttcttcctggtggtcgtgcagatggcgatggtgcaggctctacaagcttacgatgtgagcaccacgatggtgtgtcaaggcatcggtacaggtacgcgccgcctctgacgccggaagggttttggaacattggtttcgaatcagaaatgtag

SEQ ID NO: 299 - protein, 340 aa, Zea mays
MSSSSAHQKASPPIEEEATEHGPFPIEQLQASGIAALDVKKLKDAGLCTVESVAYSPRKDLLQIKGISEAKVDKIIEAASKLVPLGFTSASQLHAQRLEIIQLTTGSRELDQILDGGIETGSITEMYGEFRSGKTQLCHTLCVTCQLPLDQGGGEGKALYIDAEGTFRPQRILQIADRFGLNGADVLENVAYARAYNTDHQSRLLLEAASMMVETRFALMVVDSATALYRTDFSGRGELSARQMHLAKFLRSLQKLADEFGVAVVITNQVVAQVDGAAMFAGPQIKPIGGNIMAHASTTRLFLRKGRGEERICKVISSPCLAEAEARFQISSEGVTDVKD

SEQ ID NO: 300 - protein, 301 aa, Zea mays
MTGRPPLYARSPARRQAFASNEHPPPGKRTLPPSLPAMTGRPPPYARSSARRQAFAGDEHPPPALLGPPPLVDPSAGRGVCLMSTSWRDKQRPELVNFVATFLATNMYRLNFMSLSPDFIFNNGGLSVAFAFETDWLPEREAAVFSRVTTLKRQFKYLYVVVVVRSAEQNESFNQSYFKYGMELGCPTFVPVCDPAMGFEKIVRIAHARGVCKQKDNIATMRIEREQAVQCMDAFLRVLTSIPGIDSHDANALAQAIGSIEAIAKASKEFILENTDLSTEKAERIVRFFRDPQYFLSPKLN

SEQ ID NO: 301 - protein, 347 aa, Zea mays
MADAADSSMALVHSSLADSVLTSPRTLRQGQKWEVEYARYFGTPRRDPTAAPPSGLRYIMRGVHRHQGTWIPASCPASLCVCHPSLPSAVPVLTISIGDVVFEEHFVSILNFSWPQVTCVTQCPIRGSRVVFVSFCDKFKQIQKFAVRFPQPCDAESFLSCVECSCGSSGTMDIIPFGSDYVCEDSSASEYIVSNGLHHRLDDASNLEEQCFDHTIDEPPMNYHEETDQHVLEPLSASNTSNNSAFPPSFNQMLKSCSIDYDQEEPCPLAASNHVLQEVYVLDTSHDVANEERTAGKGMDAAEGVDASILTYDLMARIKTYMADESFNDMLLKLDKAIDELGGDMSL

SEQ ID NO: 302 - protein, 695 aa, Zea mays
MSACGGTIPASRFLRRRAAVRDLGGDAAAGDTDAFWAAPPRLYDFSQQQQQQHTAQAARRSPSPAPTSPCLLARKRHQQSPSPPPSPRRSPSSPGTCLLSALHRTCVGWGVTRRAEYPRRHRPVSPAACGQVTGMHTHGRAAARCVDEDEESTSKNSKCLLAVGKNELEEEVGQDHESCLHRRRRAKKAPWAVKEEQETSGEAAEEGAKRAKRTPLKHEAAAAAESKPAGAATATATPDSGSPRGNGKVDRWAAWRYAAGEAALANILRERGATAGNPTPRAVLRAQARRFISDTGLLDNLLRHVADKVPAGTADRVRRRYNPAGGMEYWIEPAGLAAARREAGVEDTYWVPPPGWKPGDPVSPEARTLEVQKQVEVLAGELAVVKRQMEQLDSNLVQMSKEAYISWKGYDCMVKANGKLEKEVLSLEEKYETAAQVNGELKELLLLLKDKYDTVLEKNEKLEGQMVALSTSFQSMKEELLLQRMEEHPLLMLAQEPWEGDKREAGGANKALVVCAGDQLAGADAFDGSFSSNHSAYGDEKMVLRKRICVREGACQWPRSATSSGATAGSPGDLPEPLTPGADLIVTDFDTMIDSLALPSMEEYLQVDGLPTPTSASSTTASPKLQLLPSPASPSQVQPLPSTTMVVGDFNMQLRHMDTSSSSSSGPCGAKALKLDAGAGGGEVGTELVLATPTY

SEQ ID NO: 303 - protein, 1201 aa, Zea mays
MGSLADPYALRCVSDLPPPFRSMFRFRYFNSLQSECFHVCFFSDVNMVISAPTGSGKTVLFELCILRLLSRFLSPDWRFNLNKGTLKTIYIAPSKALVQEKLRDWNMKLGPLGINCLEMTGDGEFCNTKAIHDADLILTTPEKFDSMSRHGIKSGRLGFFCDIALVLIDEVHLLNDPRGAALEAVVSRIKMLSRHDNMKSFPLANVRLIAVSATIPNIEDIGYAPAKNDFLFERKYKWNMDYRYTDATFKGEVCTYFLFYEKRCNPVPFSVGFHNGGLCLKDRGLVEGLFLKGDLQVLCTTNTLAHGVNLPAHTVVIKSTQFFNKEKGLYVEYERSMVLQMCGRAGRPPFDDTGTIIIMTRKETVHLYENLLNGCEMVESQLLSCAVEHLNAEIVQLTVSDIILAVEWIKCSYLYIRIRKNPENYGVKRGTPQDLLEKQIQDICVDKIHELVEYGLIWTDEGAFVLQPLEPGRLMAKFYLKFDTMKLIVKASGYCRIQLRRNDKKILNDINADKDGRLLFHIVMKNGKRKKRVQTREEKIFLLANDCLTGDSLIHDLSLNQETNAICSNGCRIAKCMREYFIYKKNYRSAINSMILANSLHQKLWESSPFLLKQLPGIGIVTAKALKTAGVYSFETLATADARKIELATGRNYPFGNHIKESMSSLPPKIDIHIEETGNRLGKSTITVTLTRLSQAVKSSKRNCADMVVASEEDNVILFHENISPYSVKVFVPCPQNARVTLKVDLIFEEYVGLDVHKKHVVSREDGLYVTKEHGIDNLEPTYNIPSEICLVSSRTTRTSRSQSHTEQNPLSKEVYVIEDDGAAVSAVSALEKADDAVGTIKFNNLASLEVPSFDLLPEEEYGAPGPAEAECKGATDSTIFDHIRKKSKDFPTLMLSKSMDCSYEPLILKKMKISRDQFGVKHGCLHAGEATTMDFDPVEPRVSPTNTAEKFRGILGRSSERSRMLFGKMDSPFEKSEMLGTTPAESSLRFAGGKDSSLEKNKTLIRTPAENSLQIAARGKESKVSKVLTNLDKSPLGFAGGKESKMSNVPSTSAENSLQFAARRVRSSEKSKMLTTPYESSQAFLGEKDSPSEKSKILINSPVEYPFKKGSPGENPFKTCSPVENSLKFAAQRDSPSEKRKSCISNPLPPFQQAVQCTKQVGVAGQPFDIKEYCKEILRSRNDSQGGDPFAGYKSIFSFL

SEQ ID NO: 304 - protein, 595 aa, Zea mays
MTGAGMKLKINKACDLSSISVLPPRRTGGSGGAGSSAAAAAVAAGSQQRSQPLSQQSFSQGAVGSGGASSLLHSQSQLSQASLDENLLTLHLASPARDQGFRLHDDSSKKMTSLPVTSASCVREESQLQLAKTSSNPVHRWNPSLPDSRCSGLTGVVPAEDVERKFQHMASSVHKVGMVLDSVQNDTMQLNRAMKEAALDSGSIQQKIVVLDTSMQKNLKGQGDLKVLVESNTKNIADQLAVLNSHSNKLVEISSALSVLPKQIERDLKQQQSDIFRIFRNNMEEIARAVKSLNSKIDAIQMPTEQRCTTNGRPLMNQLPVDRNERPQVNQTPEVTRVSQTTVASLVNQAPAANGRHLMSKTPAANGKSVMRQTPAENGRHLVSQTPAANGKTLKRQTSVTNGISLMSQVPAANGKPVVIQIPAPKGRPMMRQKTAESGRTEMNEIPVASGRPHTNKIPIAEVHPAPLVCPAKQVATDPKPKVDEEKLKALPQKLTSSRSRVAPKQEEAANTKVISRAAATEKVVIFIDDSDDDNDVRASCVILRPSGSGSLGERECDLMKVGAEESQEIPRRARKRRRREMQATVGVACMPLPA

SEQ ID NO: 305 - protein, 602 aa, Zea mays
MFYSHQLLARKAPLGQIWMAATLHSKINRKRLDKLDIIKICEEILNPSVPMALRLSGILMGGVVIVYERKVKLLYTDVSRLLTEINEAWRIKPVTDPTVLPKGKTQAKYEAVTLPEINMVVEQPMFFSEPDGAKFRRMGLEDLDEQYVQVNLDDDDFSHADDRHQAKAVNITLVDNFESGLAETDLFNHFERFDIADDETTVNITPDEYPQVPSTLIPSPPRQEDIPQQEEPYYAAPSPVHGEPQQGGPEDQEEQKMKQPPKASKRKARWEVPRVIMDNNQMMIPGNIYQTWLKDASSLVSKRRKLNSNFNFIRSTKISDLMHIPPVALISHDNLFSELCYPKPLMQLWKDCTEVKSTKASSGGQRSSSQEPQPKNSPPQAGGEYEMETGGLPMDLTDGIEKLRANMSAKYDRAYNILHSDHSVTPGSPGLSRRSASSSGGSGSAFIQLDPEVQLPSGSGRSKRGQHSSARSLGNLDTVEEDFPLEQEVRDFKMRRLSDYVPTPDLLEETEPTQTPYERRSNPMDKITETIQSHLKLHFDTPGVPQSESLSHLAHGMTKARAARLFYQIAVLATCDYIKVTQLERKGDELYGDILISRGLKM

SEQ ID NO: 306 - protein, 496 aa, Zea mays
MRSGFNEDQKFSFRSSACKMIRTLVSLMRTLDPMPEERTILMKLLYYDDVTPEDYEPPFFKCCADNEAISIWNKNPLKMEVGNVNSKHLVLALKVKSVLDPCDDDNVNSEGDGMTVDNESDHDDDFSDTEVHPPKADHYIIAPNGKHVLSNVCICCFGIINRSFLTEGKDKDQDTGTISEDDTQDTAHEEELTSQVKEWICSRDSGTINVSDVLSNFPDISMELVEDIMDRLLKDGILSRASKDGYTVNQKADPKTPHIKKEAIMPDVSPTNVTKHNNGDLLYMKALYHALPMDYVTIAKLQGKLDGEASQNTVRKLIDKMVQDGYVKNSANRRLGKAVIHSESTNKRLLEIKKILEVNEGEKMAIDTNTEHPEPEHKDLLRVYEVGDGSTMGCLHSIGSDLTRTRELPELQQNVSMQSGQEASTVGKDSSRTPTSVRELAVPVCSLESGVLGKRIKRSLTGGNEMQSTQDKRSRKASMVKEAILQHVKCQNPQAQ

SEQ ID NO: 307 - protein, 211 aa, Zea mays
MSKKRGLSLEEKREQMLQIFYESQEFFLLKELEKMGPKKGVISQSVKDVVQSLVDDDLVLKDKIGTSVYFWSLPSCAGNQLRNTYNKLESDLSNSRKRYMDLVEHRDNLKRGREDSEEREAALEELKTVELHHKKLKEELAAYADSDPAAVEAMKDATDIAHSAANRQHFHFATMVFNHIPRSKRTTGTYVQGGMFLSCSVLTFLCLQYAA

SEQ ID NO: 308 - protein, 126 aa, Zea mays
MPIFALVDWNPAGLAILCTYKYGSISMGLESYRYACNVKWLGVRGGDLHLIPEDAFQELKPRDLQIAKSLMSSKFLQESHRAELALMVERGKRADIEALYSHGFDFLGKYIARKIRRAITSDDGMM

SEQ ID NO: 309 - protein, 265 aa, Zea mays
MPPRRANENFLEAYEVILILDDREKFGSRSRKVADNICSLSHFAVDVRQLPVGDGIWIARHKEDHTEYVLDFIVERKEVMDLDGSIEDNRYRDQKLRMKKCGLRKLIYLVEGDLNRAPKRVKTACFTTEILDGFDVQRTTGFADTQKRYVDLTRSVIAYYDASFSIVGKASPVCPTYDDFKRKCYDLKKKTVSDIFGCQLMQVPQVTEEAAQAVVELYPTPLLLAKAYSILGGDTSAQEKMLKKKNEMVNAGASRNIFHLIWGDG

SEQ ID NO: 310 - protein, 298 aa, Zea mays
MAAAGGGREATTSGCGLKRRYAPHDQEEETMNQDQPSKEDRCGRIWSGIDLLKDVTENKHVLPTGLEGIDRLLGGGLRQGQLTEVTGPSSSGKTQVCLHSASHAPVKHTGVVMYLDTSNSFSPSRIATIIDGTNDLSDQKGFDLLSKERLKTVMQSIICESVFDIFGMFEVLHQLEVSLLNEKVIGDGRRICLLIIDSISSLLAPIIGGKYPQGRSMMISLAMILKKLAYEHNLAVLVTNHMVSAGNGAVKPALGESWKSVPHVRLMISREHSSNICTGTVLKHTLLASGRTAKFVLP

SEQ ID NO: 311 - protein, 867 aa, Zea mays
MQKHSGLRSLEGFRSLVGSTSTAMKVANPRPSPDTGGISYGSFANLKITAEKLVKEQASVKTDLEMAHVKLRRATEQINIIEGKLQQALNENAKLKVKQTEDSKLWQGLDSKLSSTKTLCDQLTETLQQLASQTEQAEEDKKFFEEMLGKNSKALDEFNCLLRDLSTKLEYAEQKIISGRQEMLQIKQEKEEMDRSYKGQLYSNDTTIKEKDSLIKQLEGSLDDNKSRLIYLDSRLQCMEQELKLKDDVCISLKGNLASSESEKNSLELMNKGHILEIKKLCQDNKDLNELFSSFMVKVTELDKEHASMSSHVSRLISSFERFYEMAQEEKMLMARSSKDKFEHLQSQYVDLTSENNALKTEIEELKSRLIELQRTQEIVMVQHVEECQVAEDKIRRLESEAEVSASNINQLEKLASELQGRIQKLLEDSTFAENHKQELLQKILKLESDNQELLGQMQSIMEEKSNNAESLHGEITKRDQQVDTLENQINQLRSVLDEKEQLYLCSVQKEKTLEEQKLQVEALLSATECKLSDAKKQYDLMLEGEKIELSKHLKELSLKNDQAINEIRKKYELEKIEITNAEKEKAEKLIREIENKCNEKISQNKHDSQRYLICLKEEHGTTVARIQQDNEHKESTLRAYHKEELQRIQSQAENEMRERLSLLRKEHEVQIKSLRMHHEEECQRMQEELELQKSKEEKQRALLQLQWKVMGESQRVDQEVNSKKEYSVSSIRRSDPYGRKEQEVQLVSPETNRKDVNLPGILQSPISNMLRKVEKVSQDIPKHRKVTHHEYEVETANGRITKRRKTRSTVMFGEPNSQKPLHNTTDKDVKKLKKVPTRSRAHPANIGELFSEGSLNPYADDPYAFD

SEQ ID NO: 312 - protein, 678 aa, Zea mays
MRRRNLIVHSDSDEDDGEGMTTATTPASVSASVASGGVSGSGSVGRPSPQNLSPLPVPFPSLSLSSAPFVISDDDEDVDEIVDPDGDSPIVDAPEVFSPPAPPALHAPAPAPPSPPPPITTPSQTPIPTPPSARTPTPTPPSARTPTPTPPSARTPASIAPPHPSPLSGRLRPVDEFLRRLGLLLRPDWLESCAAGIPGFDGLGGVEAQARRCFEQFLFADMNSCGAGVLPEGVGGMHAEFLDGPFVLQVDEVVNISVPLKERYREAPAGPKRCLKLSMTDGIRHIFGMEYRPIKDLTVLAPAGLKIIVRNVHTRRGLLMLVPEAVEILGGVVDELEAARARLVSEVNKPPRGKSKQGGLSLSSRATRAAWPCSTDITNGVAQGISMQRAVNSSYPTGSGNAFQVGGATETVVEELVSPLVANRVQEINMQGSYASLTRETTETSMHTTHEYDPTHITEKSTGTVMEERPDPPILANSVHEQMQRVQPANGAQSSNVGKINQMEQSFILSGENEKPFTYIYSMLIDWGRQQDTKAYIQGKIKGLITSVKKFQYKQRTKYELYVYIDDGSFISEAFIDSDIVNNMLGLSPGEVTAALAGELEFASPSEVKETLKGFQKFLVKFEGMMLIELNKNSPVPVVRELNEGCSSSTAWLLLGRLKTISSQKKTIQTQDIMDTTP

SEQ ID NO: 313 - protein, 689 aa, Zea mays
MPSRRALRRSPPPRQSPQAAADAKEAASPWLPSSSSTSSSSSSASALVRRSAAFSAAGPRGGSGTRVYPLRDFPGGDAAALGGAFRDNVRWLLKQWSCVPGSVSAWRALLSDERTGALVPVIAVEELAASSPLPLCDLCRCAGWSHHWVSKRKYHFIIPAVVDWDQPFRADGLLGHSEHLLHGLIHSNGFGHLLTLRGRVGGSTFLSGCQIMDIWDQLCTALRVRAVSVVDLTQKYSVDLRLLLGVAQSKTWFTRWGYCLAKGCFSVSRSTYTAALEALAALPVDCLRSRHVRRVVTIYRRLSSKPLVTVREFLLCLLDWKHREPPLSPPPVKASSRLMFLLPKSCMMKRPRQPCQRFEDVVDLLECRWSKKRLLSAANVVVAKLREHADGTKITRQAVRDAARGGIGDTGLLDFVIKSLNNTVVGNHIVRRVPDPENRVLHFSLEEYAEPEPQPQADHELEPVELDAENTPPAVRWPNAAEAERDLRAVYRAMVGARSEAAQAVLDCKHWVKWWGLRDESDDQLRFLVEWRPQPWEATELTRPMPPGDIVVVPLHASIGELLVEAEHALRDTYCFFENFQAESLDGITGDKWDPVMLGGAESGDTIGVHGHGADMETGLRCQGGADAWEVQCVCGAQDDDGERMVACDACNVWHHTRCVGIADGAPVPPLFLCISCSGALMAAGPISG

SEQ ID NO: 314 - protein, 1126 aa, Zea mays
MAAADGDALIAAFAVSKGGIVLKHIFLNAPPPEAMCGSGGREVESDEEDPPVMVGRHPDCHVLVDHPSVSRFHLELRCRRRQSLITVTDLHSVHGTWVSGRRIPPNTPVDLATGDTLRLGASKREYKLLWLSLREAFEMDDLMYMPSLPEEDKEEPYVKEPSSKLLPGHRDSVNMETHQDTSEQIVSEDIAFPAKVAPSAPPLSEFLQPFFVEEHSLSQFHEKRNGVTEEKLVDKNQISESFGSLIIQEMPGTLTNAGKSIQSGEQEDASNKVSKRSKLKSVKSLRVDTGRSSERSSTLSHSFQKGDQNDIVVCSQSCGTECAVCIALFGISEIEKAEEKEELIAEDNVDMNPPASMIMEGNMNERKPDNYIPQDPIGAKLQKKLGLLDSALPLHFKDDVFADKEIPQWNVASVHTESELLSEYLIIPEVKHDDLNHLNLEEGLSKSENINPNKITEGPGNCQLEGTIRGNLFDNLDTDGIEEGEEICPLDKDEITPNGSGNIIMERSNIVLKPTISQQLMDSISPLNLDHGDFSENENSMLNTGDQMKLNEPVSENLNPLIPTDEKYLKSQTEECMPISYLEFKDDILLDRENSVLAPRKYEAMSPVRQENLFSDKENVTPASKVKTVVRGVLGTRMDNSVSAANASNKNKVLGSRVDNSVSTENSSNKKQCELSSKSKKVHTVDFDVFYSDKENLTPISSGGMKARKCFPKDLSVDLDQDQEAFCSDKENLTPLSSAARKTRDMSGNLTRVESAVTKKRVVGRLPFQTLVSNSPLRPASSHDCTCAVARPAGVAAGDLAIKLEDKLNDLSCNGHESGSAGEGMKTWTMVANTDSLLDDESRKAIMLLKGLKGTRLFIPRIVIRELDSMKQREGLFRRSTKATSILQWIEECMARESWWIHVQSSADMFPVAPTPPATPSAQRIDEEIEISSGSFNPMMALFGPRSSAALADMISPRPEDRVLDCALLVSRVRSNEKVVVLSNSVTLKIKAMAEVSTVTTQTQPCLLAVCVRTEPGCVALPAAQGLPCEGAKEFRESLVDPSSRRFMWAASAPRGSAWSCLDASALAENYYNSRHHAMKRRVLVAARPSESEAAKGLKLILRHNSLYAQATDAVNKTPLVSLAAV

SEQ ID NO: 315 - protein, 407 aa, Zea mays
MAGRDKRRRAAPLEGDEQQLRRRLEEAALLLRRIKGLVRWIVEEVAAGRSPSIVLHRYRNYCSSADSASPSPCACSYDIPVGTDVLSLLHKDYHTSRLSTNTSKSLHLCDHTNYFLMRCSCVDVLLRVLFVVQQLLQQNKHCSKRDIYYMYPSIFVEVAVVDRAINDICILFKCSRHNLNVVPVVKGLVMGWIRFMEGEKKVYCITSVNAAFSIPVDIEAIKDVVSVAHYILVVEKETVFQRLANDKFCERNRCIVITGRGYPDIPTRRFLRYLVELLHLPAYCLVDSDPYGFDILATYKFGSLQLAHDANLLRVPDIRWLGVFTSDFEEYCLPDCCLLRLSPEDRRKAEGILARCYLHREAPEWRSELEAMLQKGVKFEIEALSANSISFLSHEYIPQKIKQGMHL

SEQ ID NO: 316 - protein, 555 aa, Zea mays
MEGKAVAVGCGGARVDPADDLKYISGLSTILVATIQEVKDQVSQMEFIFCSQLFPHIQAKSKLVQAHLADTMKASEVEWRKTEAGLVKQLEEVSRGKMLAEERLLQLGTSLEEMKRKLVDSEQLAARHEAEKKQLLGRLEDETRKGEVVRQLQREIEEKDAEVVREREAHQRLLQEFEQLAARHESEKKQLLGRLEDEMGNGEVVRQLQREIEEKAAEVVREREAHQRLQQQVDLKDKNLLLEQSKRRDLIEDYTQLKTNYKHLKSQYTFLLGKIDQHEGSKPPEDIPADRRNTESPPSKRKFKDLEHTNKERIQILPNTRDLKNDSAPGAKAQAAQHASSVRSPIRNSHLAVPSRPMNPLANHSANNSKLQASTSVASPCLNWRETRARKEQGVADPHDDFLDTPLEAVKNTIRNPATPEEALALAASPQVMDFDNSDDETQDLNIATQALRHIPNMPVTKQQNTISVHPPKKDFKYRESVRKKADRENLKGVECKQCKKFYDAVLPGGRADGDGAGSTSLRCEHHDGVSRHRYRYAPPLTPEGFWNIGFESEM

SEQ ID NO: 317 - DNA, 21403 bp, synthetic construct
  misc_feature 1..21403: note = RV036376
  source 1..21403: mol_type = other DNA
gtttacccgccaatatatcctgtcaaacactgcggccgcacttgaccgcggatggagccggagctgtggtgaggccatcgacgggaggtgggggagaacacagtctcagtgttctttgtgagtccgcaaggtttttagcttttctgtattaattaaggttgctgttggctgtagaatacggtcgtggaagagctgtatcggtagctactacgtaagctattatatactggaagtctggagctcgtcgatctccggtcgtcttcctccatttctcctcgtcttgctttgactgctgctaccatttgcttctgttttctgatgaagcatgccatgtcggccaccagtgtttgtgtggtttttgcagggaatggctttcaagtgctgtgattgaatggccctcgtcgtcctcggctgagctcacatggacgcgtcatgtgagtgagatatatgatcatatgatgagtggggttcgggtgagtgcgtacttgaagtaggatcccgctttcactcattcattcattggcctttaaaccgggaaattttcgcgaggagatggagggaagcaagcagggtgacgagtgcagagtgccgcgagcgctttgtcaaaaggcaccgccgtaggcaaaaaaatcaatggccctgactgactcgatggtagtactactgtagagactagagagggttgctccccatatcttcgtgtgacttttactccagcattgcatttccgtcattgagacgttaattaatagcagctttcgggacagatgactgtggccatgtttcgtcacggccgcttcgtgccagctgggggtactatagtactgtgattttgttagtaaaaactttcattaggccaccattgacgaccgggccttcgcttttgctgcgctaattaaccatttcccggcgaccgaagggaacatgaacatgccccgacacatgagggcatgaggactagtgttctccctgtcgttcgttgacttgactagtgatagtttaaacgctcttcaactggaagagcggttactaccggttcactagctagctgctaatcgagctagttaccctatgaggtgacatgaagcgctcacggttactatgacggttagcttcacgactgttggtggcagtagcgtacgacttagctatagttccggacttacccttaagataacttcgtatagcatacattatacgaagttatgggcccacgcgtgaagagcggttaccagagctggtcacctttgtccaccaagatggaactgtcttcggccagaatggccatctggattcagcaggcctagaaggccatttatcgctatcaactttgtatagaaaagttgggccgaattcgagctcggtacggccagaatggcccggaccgaagcttgcatgcctgcagtgcagcgtgacccggtcgtgcccctctctagagataatgagcattgcatgtctaagttataaaaaattaccacatattttttttgtcacacttgtttgaagtgcagtttatctatctttatacatatatttaaactttactctacgaataatataatctatagtactacaataatatcagtgttttagagaatcatataaatgaacagttagacatggtctaaaggacaattgagtattttgacaacaggactctacagttttatctttttagtgtgcatgtgttctcctttttttttgcaaatagcttcacctatataatacttcatccattttattagtacatccatttagggtttagggttaatggtttttatagactaatttttttagtacatctattttattctattttagcctctaaattaagaaaactaaaactctattttagtttttttatttaataatttagatataaaatagaataaaataaagtgactaaaaattaaacaaataccctttaagaaattaaaaaaactaaggaaacatttttcttgtttcgagtagataatgccagcctgttaaacgccgtcgacgagtctaacggacaccaaccagcgaaccagcagcgtcgcgtcgggccaagcgaagcagacggcacggcatctctgtcgctgcctctggacccctctcgagagttccgctccaccgttggacttgctccgctgtcggcatccagaaattgcgtggcggagcggcagacgtgagccggcacggcaggcggcctcctcctcctctcacggcaccggcagctacgggggattcctttcccaccgctccttcgctttcccttcctcgcccgccgtaataaatagacaccccctccacaccctctttccccaacctcgtgttgttcggagcgcacacacacacaaccagatctcccccaaatccacccgtcggcacctccgcttcaaggtacgccgctcgtcctcccccccccccctctctaccttctctagatcggcgttccggtccatgcatggttagggcccggtagttctacttctgttcatgtttgtgttagatccgtgtttgtgttagatccgtgctgctagcgttcgtacacggatgcgacctgtacgtcagacacgttctgattgctaacttgccagtgtttctctttggggaatcctgggatggctctagccgttccgcagacgggatcgatttcatgattttttttgtttcgttgcatagggtttggtttgcccttttcctttatttcaatatatgccgtgcacttgtttgtcgggtcatcttttcatgcttttttttgtcttggttgtgatgatgtggtctggttgggcggtcgttctagatcggagtagaattctgtttcaaactacctggtggatttattaattttggatctgtatgtgtgtgccatacatattcatagttacgaattgaagatgatggatggaaatatcgatctaggataggtatacatgttgatgcgggttttactgatgcatatacagagatgctttttgttcgcttggttgtgatgatgtggtgtggttgggcggtcgttcattcgttctagatcggagtagaatactgtttcaaactacctggtgtatttattaattttggaactgtatgtgtgtgtcatacatcttcatagttacgagtttaagatggatggaaatatcgatctaggataggtatacatgttgatgtgggttttactgatgcatatacatgatggcatatgcagcatctattcatatgctctaaccttgagtacctatctattataataaacaagtatgttttataattattttgatcttgatatacttggatgatggcatatgcagcagctatatgtggatttttttagccctgccttcatacgctatttatttgcttggtactgtttcttttgtcgatgctcaccctgttgtttggtgttacttctgcaggtcgactttaacttagcctaggatccatggcaccgaagaagaagcgcaaggtgatggacaagaagtacagcatcggcctcgacatcggcaccaactcggtgggctgggccgtcatcacggacgaatataaggtcccgtcgaagaagttcaaggtcctcggcaatacagaccgccacagcatcaagaaaaacttgatcggcgccctcctgttcgatagcggcgagaccgcggaggcgaccaggctcaagaggaccgccaggagacggtacactaggcgcaagaacaggatctgctacctgcaggagatcttcagcaacgagatggcgaaggtggacgactccttcttccaccgcctggaggaatcattcctggtggaggaggacaagaagcatgagcggcacccaatcttcggcaacatcgtcgacgaggtaagtttctgcttctacctttgatatatatataataattatcattaattagtagtaatataatatttcaaatatttttttcaaaataaaagaatgtagtatatagcaattgcttttctgtagtttataagtgtgtatattttaatttataacttttctaatatatgaccaaaacatggtgatgtgcaggtggcctaccacgagaagtacccgacaatctaccacctccggaagaaactggtggacagcacagacaaggcggacctccggctcatctaccttgccctcgcgcatatgatcaagttccgcggccacttcctcatcgagggcgacctgaacccggacaactccgacgtggacaagctgttcatccagctcgtgcagacgtacaatcaactgttcgaggagaaccccataaacgctagcggcgtggacgccaaggccatcctctcggccaggctctcgaaatcaagaaggctggagaaccttatcgcgcagttgccaggcgaaaagaagaacggcctcttcggcaaccttattgcgctcagcctcggcctgacgccgaacttcaaatcaaacttcgacctcgcggaggacgccaagctccagctctcaaaggacacctacgacgacgacctcgacaacctcctggcccagataggagaccagtacgcggacctcttcctcgccgccaagaacctctccgacgctatcctgctcagcgacatccttcgggtcaacaccgaaattaccaaggcaccgctgtccgccagcatgattaaacgctacgacgagcaccatcaggacctcacgctgctcaaggcactcgtccgccagcagctccccgagaagtacaaggagatcttcttcgaccaatcaaaaaacggctacgcgggatatatcgacggcggtgccagccaggaagagttctacaagttcatcaaaccaatcctggagaagatggacggcaccgaggagttgctggtcaagctcaacagggaggacctcctcaggaagcagaggaccttcgacaacggctccatcccgcatcagatccacctgggcgaactgcatgccatcctgcggcgccaggaggacttctacccgttcctgaaggataaccgggagaagatcgagaagatcttgacgttccgcatcccatactacgtgggcccgctggctcgcggcaactcccggttcgcctggatgacccggaagtcggaggagaccatcacaccctggaactttgaggaggtggtcgataagggcgctagcgctcagagcttcatcgagcgcatgaccaacttcgataaaaacctgcccaatgaaaaagtcctccccaagcactcgctgctctacgagtacttcaccgtgtacaacgagctcaccaaggtcaaatacgtcaccgagggcatgcggaagccggcgttcctgagcggcgagcagaagaaggcgatagtggacctcctcttcaagaccaacaggaaggtgaccgtgaagcaattaaaagaggactacttcaagaaaatagagtgcttcgactccgtggagatctcgggcgtggaggatcggttcaacgcctcactcggcacgtatcacgacctcctcaagatcattaaagacaaggacttcctcgacaacgaggagaacgaggacatcctcgaggacatcgtcctcaccctgaccctgttcgaggaccgcgaaatgatcgaggagaggctgaagacctacgcgcacctgttcgacgacaaggtcatgaaacagctcaagaggcgccgctacactggttggggaaggctgtcccgcaagctcattaatggcatcagggacaagcagagcggcaagaccatcctggacttcctcaagtccgacgggttcgccaaccgcaacttcatgcagctcattcacgacgactcgctcacgttcaaggaagacatccagaaggcacaggtgagcgggcagggtgactccctccacgaacacatcgccaacctggccggctcgccggccattaaaaagggcatcctgcagacggtcaaggtcgtcgacgagctcgtgaaggtgatgggccggcacaagcccgaaaatatcgtcatagagatggccagggagaaccagaccacccaaaaagggcagaagaactcgcgcgagcggatgaaacggatcgaggagggcattaaagagctcgggtcccagatcctgaaggagcaccccgtggaaaatacccagctccagaatgaaaagctctacctctactacctgcagaacggccgcgacatgtacgtggaccaggagctggacattaatcggctatcggactacgacgtcgaccacatcgtgccgcagtcgttcctcaaggacgatagcatcgacaacaaggtgctcacccggtcggataaaaatcggggcaagagcgacaacgtgcccagcgaggaggtcgtgaagaagatgaaaaactactggcgccagctcctcaacgcgaaactgatcacccagcgcaagttcgacaacctgacgaaggcggaacgcggtggcttgagcgaactcgataaggcgggcttcataaaaaggcagctggtcgagacgcgccagatcacgaagcatgtcgcccagatcctggacagccgcatgaatactaagtacgatgaaaacgacaagctgatccgggaggtgaaggtgatcacgctgaagtccaagctcgtgtcggacttccgcaaggacttccagttctacaaggtccgcgagatcaacaactaccaccacgcccacgacgcctacctgaatgcggtggtcgggaccgccctgatcaagaagtacccgaagctggagtcggagttcgtgtacggcgactacaaggtctacgacgtgcgcaaaatgatcgccaagtccgagcaggagatcggcaaggccacggcaaaatacttcttctactcgaacatcatgaacttcttcaagaccgagatcaccctcgcgaacggcgagatccgcaagcgcccgctcatcgaaaccaacggcgagacgggcgagatcgtctgggataagggccgggatttcgcgacggtccgcaaggtgctctccatgccgcaagtcaatatcgtgaaaaagacggaggtccagacgggcgggttcagcaaggagtccatcctcccgaagcgcaactccgacaagctcatcgcgaggaagaaggattgggacccgaaaaaatatggcggcttcgacagcccgaccgtcgcatacagcgtcctcgtcgtggcgaaggtggagaagggcaagtcaaagaagctcaagtccgtgaaggagctgctcgggatcacgattatggagcggtcctccttcgagaagaacccgatcgacttcctagaggccaagggatataaggaggtcaagaaggacctgattattaaactgccgaagtactcgctcttcgagctggaaaacggccgcaagaggatgctcgcctccgcaggcgagttgcagaagggcaacgagctcgccctcccgagcaaatacgtcaatttcctgtacctcgctagccactatgaaaagctcaagggcagcccggaggacaacgagcagaagcagctcttcgtggagcagcacaagcattacctggacgagatcatcgagcagatcagcgagttctcgaagcgggtgatcctcgccgacgcgaacctggacaaggtgctgtcggcatataacaagcaccgcgacaaaccaatacgcgagcaggccgaaaatatcatccacctcttcaccctcaccaacctcggcgctccggcagccttcaagtacttcgacaccacgattgaccggaagcggtacacgagcacgaaggaggtgctcgatgcgacgctgatccaccagagcatcacagggctctatgaaacacgcatcgacctgagccagctgggcggagacaagagaccacgggaccgccacgatggcgagctgggaggccgcaagcgggcaaggtaggtaccgttaacctagacttgtccatcttctggattggccaacttaattaatgtatgaaataaaaggatgcacacatagtgacatgctaatcactataatgtgggcatcaaagttgtgtgttatgtgtaattactagttatctgaataaaagagaaagagatcatccatatttcttatcctaaatgaatgtcacgtgtctttataattctttgatgaaccagatgcatttcattaaccaaatccatatacatataaatattaatcatatataattaatatcaattgggttagcaaaacaaatctagtctaggtgtgttttgccccggggaattgggggtagaccggttgagagtacaatgatgaacctagattaatcaatgccaaagtctgaaaaatgcaccctcagtctatgatccagaaaatcaagattgcttgaggccctgttcggttgttccggattagagccccggattaattcctagccggattacttctctaatttatatagattttgatgagctggaatgaatcctggcttattccggtacaaccgaacaggccctgaaggataccagtaatcgctgagctaaattggcatgctgtcagagtgtcagtattgcagcaaggtagtgagataaccggcatcatggtgccagtttgatggcaccattagggttagagatggtggccatgggcgcatgtcctggccaactttgtatgatatatggcagggtgaataggaaagtaaaattgtattgtaaaaagggatttcttctgtttgttagcgcatgtacaaggaatgcaagttttgagcgagggggcatcaaagatctggctgtgtttccagctgtttttgttagccccatcgaatccttgacataatgatcccgcttaaataagcaacctcgcttgtatagttccttgtgctctaacacacgatgatgataagtcgtaaaatagtggtgtccaaagaatttccaggcccagttgtaaaagctaaaatgctattcgaatttctactagcagtaagtcgtgtttagaaattatttttttatataccttttttccttctatgtacagtaggacacagtgtcagcgccgcgttgacggagaatatttgcaaaaaagtaaaagagaaagtcatagcggcgtatgtgccaaaaacttcgtcacagagagggccataagaaacatggcccacggcccaatacgaagcaccgcgacgaagcccaaacagcagtccgtaggtggagcaaagcgctgggtaatacgcaaacgttttgtcccaccttgactaatcacaagagtggagcgtaccttataaaccgagccgcaagcaccgaattgtgatgcatccggacggggttttagagctagaaatagcaagttaaaataaggctagtccgttatcaacttgaaaaagtggcaccgagtcggtgctttttttttgcggccgcgaattctgagagtacaatgatgaacctagattaatcaatgccaaagtctgaaaaatgcaccctcagtctatgatccagaaaatcaagattgcttgaggccctgttcggttgttccggattagagccccggattaattcctagccggattacttctctaatttatatagattttgatgagctggaatgaatcctggcttattccggtacaaccgaacaggccctgaaggataccagtaatcgctgagctaaattggcatgctgtcagagtgtcagtattgcagcaaggtagtgagataaccggcatcatggtgccagtttgatggcaccattagggttagagatggtggccatgggcgcatgtcctggccaactttgtatgatatatggcagggtgaataggaaagtaaaattgtattgtaaaaagggatttcttctgtttgttagcgcatgtacaaggaatgcaagttttgagcgagggggcatcaaagatctggctgtgtttccagctgtttttgttagccccatcgaatccttgacataatgatcccgcttaaataagcaacctcgcttgtatagttccttgtgctctaacacacgatgatgataagtcgtaaaatagtggtgtccaaagaatttccaggcccagttgtaaaagctaaaatgctattcgaatttctactagcagtaagtcgtgtttagaaattatttttttatataccttttttccttctatgtacagtaggacacagtgtcagcgccgcgttgacggagaatatttgcaaaaaagtaaaagagaaagtcatagcggcgtatgtgccaaaaacttcgtcacagagagggccataagaaacatggcccacggcccaatacgaagcaccgcgacgaagcccaaacagcagtccgtaggtggagcaaagcgctgggtaatacgcaaacgttttgtcccaccttgactaatcacaagagtggagcgtaccttataaaccgagccgcaagcaccgaattgaaggggcttcggaggatgttttagagctagaaatagcaagttaaaataaggctagtccgttatcaacttgaaaaagtggcaccgagtcggtgctttttttttgaattccaccggtgttaacggcccgggttaacggcaaacgctaattagtcactaggcccaggaaacactaactaagccctagcttatcctagcgcaacctagttaggtcttccccaagtttgtacaaaaaagcaggctccggccagaatggcccggaccgaagcttgccgagtgccatccttggacactcgataaagtatattttattttttttattttgccaaccaaactttttgtggtatgttcctacactatgtagatctacatgtaccattttggcacaattacatatttacaaaaatgttttctataaatattagatttagttcgtttatttgaatttcttcggaaaattcacatttaaactgcaagtcactcgaaacatggaaaaccgtgcatgcaaaataaatgatatgcatgttatctagcacaagttacgaccgatttcagaagcagaccagaatcttcaagcaccatgctcactaaacatgaccgtgaacttgttatctagttgtttaaaaattgtataaaacacaaataaagtcagaaattaatgaaacttgtccacatgtcatgatatcatatatagaggttgtgataaaaatttgataatgtttcggtaaagttgtgacgtactatgtgtagaaacctaagtgacctacacataaaatcatagagtttcaatgtagttcactcgacaaagactttgtcaagtgtccgataaaaagtactcgacaaagaagccgttgtcgatgtactgttcgtcgagatctctttgtcgagtgtcacactaggcaaagtctttacggagtgtttttcaggctttgacactcggcaaagcgctcgattccagtagtgacagtaatttgcatcaaaaatagctgagagatttaggccccgtttcaatctcacgggataaagtttagcttcctgctaaactttagctatatgaattgaagtgctaaagtttagtttcaattaccaccattagctctcctgtttagattacaaatggctaaaagtagctaaaaaatagctgctaaagtttatctcgcgagattgaaacagggccttaaaatgagtcaactaatagaccaactaattattagctattagtcgttagcttctttaatctaagctaaaaccaactaatagcttatttgttgaattacaattagctcaacggaattctctgtttttctaaaaaaaaactgcccctctcttacagcaaattgtccgctgcccgtcgtccagatacaatgaacgtacctagtaggaactcttttacacgctcggtcgctcgccgcggatcggagtccccggaacacgacaccactgtggaacacgacaaagtctgctcagaggcggccacaccctggcgtgcaccgagccggagcccggataagcacggtaaggagagtacggcgggacgtggcgacccgtgtgtctgctgccacgcagccttcctccacgtagccgcgcggccgcgccacgtaccagggcccggcgctggtataaatgcgcgccacctccgctttagttctgcatacagccaacccaaggatgtccaacctgctcacggttcaccagaaccttccggctcttccagtggacgcgacgtccgatgaagtcaggaagaacctcatggacatgttccgcgacaggcaagcgttcagcgagcacacctggaagatgctgctctccgtctgccgctcctgggctgcatggtgcaagctgaacaacaggaagtggttccccgctgagcccgaggacgtgagggattaccttctgtacctgcaagcgcgaggtttgtttctgcttctacctttgatatatatataataattatcattaattagtagtaatataatatttcaaatatttttttcaaaataaaagaatgtagtatatagcaattgcttttctgtagtttataagtgtgtatattttaatttataacttttctaatatatgaccaaaacatggtgatgcctaggtctggcagtgaagaccatccagcaacaccttggacaactgaacatgcttcacaggcgctccggcctcccgcgccccagcgactcgaacgccgtgagcctcgtcatgcgccgcatcaggaaggaaaacgtcgatgccggcgaaagggcaaagcaggccctcgcgttcgagaggaccgatttcgaccaggtccgcagcctgatggagaacagcgacaggtgccaggacattaggaacctggcgttcctcggaattgcatacaacacgctcctcaggatcgcggaaattgcccgcattcgcgtgaaggacattagccgcaccgacggcggcaggatgcttatccacattggcaggaccaagacgctcgtttccaccgcaggcgtcgaaaaggccctcagcctcggagtgaccaagctcgtcgaacgctggatctccgtgtccggcgtcgcggacgacccaaacaactacctcttctgccgcgtccgcaagaacggggtggctgcccctagcgccaccagccaactcagcacgagggccttggaaggtattttcgaggccacccaccgcctgatctacggcgcgaaggatgacagcggtcaacgctacctcgcatggtccgggcactccgcccgcgttggagctgctagggacatggcccgcgccggtgtttccatccccgaaatcatgcaggcgggtggatggacgaacgtgaacattgtcatgaactacattcgcaaccttgacagcgagacgggcgcaatggttcgcctcctggaagatggtgactgaggtaccacatggttaacctagacttgtccatcttctggattggccaacttaattaatgtatgaaataaaaggatgcacacatagtgacatgctaatcactataatgtgggcatcaaagttgtgtgttatgtgtaattactagttatctgaataaaagagaaagagatcatccatatttcttatcctaaatgaatgtcacgtgtctttataattctttgatgaaccagatgcatttcattaaccaaatccatatacatataaatattaatcatatataattaatatcaattgggttagcaaaacaaatctagtctaggtgtgttttgcgaatgcggccgccaccgcggtggagctcgaattccggtccgggcctagaaggccgatctcccgggcacccagctttcttgtacaaagtggccgttaacggatcggccagaatggcccggaccgggttaccgaattcttaccctagctccctgcggctgttacgcggtcccccatcaatcttctgttcttgcggttgtagcctgtgtaacagtgctagagtatgtatgataaataggttttaagtctgcttacatgacattttttattgtggaagagacatataaaaattagagagagtggttctcatgcaacggcggacggcccggtgctaaaagagcttcaagacaaaataatgaaacaggaagagagtagatttatctaagagccaactttattatatgaatgtgtttattgttggctttagatgatatggtaaggagttagagctaataatagataggctctattattattattattaattaaactcgctctaaggaggaaagtgggaggaagggacgaggacgaagactactggaagcatcgtgcatggatgatggatgtggtgtctcttaatgtaggtggccggaggatgtacgtgttaattgcgcgataagcactcagatccaaccgcaaactacctccacactgacacactgatagagagaaagagagacctccgacgactgccgccgcagatgagccacgtacgtatacgacgtctgccggccggctcaggctgccgccatcaccctgctcgaaagtcgcgttaggcggcgccagctacataggagtatctagtctagccagttagtatactactactgcgctgatgatgaattaactctgcatagatactgtacttgcctccctccaacacccaaccacctcctgctcggctcttaataacttggacacggatcgatgccatccaaggaagaacacgacgacgacgacggaacatccaccatgcaagcttgcatccatacgccgatacgcgtgcatccatccatccaccattatttccattttccaccgatcacacgtacacaggcctatttaaggagcgacatcccactgcaactctcctcaccactcatcaccagctagctctagcaaagcacttgccatctaccgaccgccgcattccaaacagcccgacgagctagcagagcggcaggcacctccctcctcaaggaacccatggccactgtgaacaactggctcgctttctccctctccccgcaggagctgccgccctcccagacgacggactccacactcatctcggccgccaccgccgaccatgtctccggcgatgtctgcttcaacatcccccaagattggagcatgaggggatcagagctttcggcgctcgtcgcggagccgaagctggaggacttcctcggcggcatctccttctccgagcagcatcacaaggccaactgcaacatgatacccagcactagcagcacagtttgctacgcgagctcaggtgctagcaccggctaccatcaccagctgtaccaccagcccaccagctcagcgctccacttcgcggactccgtaatggtggcttcctcggccggtgtccacgacggcggtgccatgctcagcgcggccgccgctaacggtgtcgctggcgctgccagtgccaacggcggcggcatcgggctgtccatgattaagaactggctgcggagccaaccggcgcccatgcagccgagggtggcggcggctgagggcgcgcaggggctctctttgtccatgaacatggcggggacgacccaaggcgctgctggcatgccacttctcgctggagagcgcgcacgggcgcccgagagtgtatcgacgtcagcacagggtggagccgtcgtcgtcacggcgccgaaggaggatagcggtggcagcggtgttgccggcgctctagtagccgtgagcacggacacgggtggcagcggcggcgcgtcggctgacaacacggcaaggaagacggtggacacgttcgggcagcgcacgtcgatttaccgtggcgtgacaaggcatagatggactgggagatatgaggcacatctttgggataacagttgcagaagggaagggcaaactcgtaagggtcgtcaagtctatttaggtggctatgataaagaggagaaagctgctagggcttatgatcttgctgctctgaagtactggggtgccacaacaacaacaaattttccagtgagtaactacgaaaaggagctcgaggacatgaagcacatgacaaggcaggagtttgtagcgtctctgagaaggaagagcagtggtttctccagaggtgcatccatttacaggggagtgactaggcatcaccaacatggaagatggcaagcacggattggacgagttgcagggaacaaggatctttacttgggcaccttcagcacccaggaggaggcagcggaggcgtacgacatcgcggcgatcaagttccgcggcctcaacgccgtcaccaacttcgacatgagccgctacgacgtgaagagcatcctggacagcagcgccctccccatcggcagcgccgccaagcgcctcaaggaggccgaggccgcagcgtccgcgcagcaccaccacgccggcgtggtgagctacgacgtcggccgcatcgcctcgcagctcggcgacggcggagccctggcggcggcgtacggcgcgcactaccacggcgccgcctggccgaccatcgcgttccagccgggcgccgccagcacaggcctgtaccacccgtacgcgcagcagccaatgcgcggcggcgggtggtgcaagcaggagcaggaccacgcggtgatcgcggccgcgcacagcctgcaggacctccaccacctgaacctgggcgcggccggcgcgcacgactttttctcggcagggcagcaggccgccgccgctgcgatgcacggcctgggtagcatcgacagtgcgtcgctcgagcacagcaccggctccaactccgtcgtctacaacggcggggtcggcgacagcaacggcgccagcgccgtcggcggcagtggcggtggctacatgatgccgatgagcgctgccggagcaaccactacatcggcaatggtgagccacgagcaggtgcatgcacgggcctacgacgaagccaagcaggctgctcagatggggtacgagagctacctggtgaacgcggagaacaatggtggcggaaggatgtctgcatgggggactgtcgtgtctgcagccgcggcggcagcagcaagcagcaacgacaacatggccgccgacgtcgggcatggcggcgcgcagctcttcagtgtctggaacgacacttaagcgtacctagtggtacctgacatcttatagtctgcaacctctcgtgtctgaattcctatctttatcaagtgttattgcttccacgactataggacagctttcgtcgaaagcttttgctcatgtgatctcgaaggattcatctagtctgatttttcgtgacttgtatcggttttattggattcatccaacatatatcaataaaaaatgagttgtgtttcctttcttcctagttcagttaaaattatttccctcctgcgcttgtgctgtaattgtctgtgtacctgttgtttgtgactgtgttagttcccttggatatgatttcgtatttgatatgtacatggagatagcttagcttcattattggagtatgaagttagtatgacatagtcactctcctggaaaattgacactgcaaaccatatttttattctgaaccacaaatcctagtcagtccgctggcatatgccgtccgtttgctgaatccagaacgtgggtttggagatgtacggctgagatgcctctatgcgaaggggatttcgtggtgaaacgagatgggagtagagcaacgcccgtggaagatgcttcaaacttccacacttttgagcaacgatcggcagtagtaaggtagacgatttcaagatcaaagcatatgaagataaacaacatcaacaacaaaatttgttggggttctatagagagaaacagagctacatacatacactgttttgtatctaccatctgagatgatgaaaagatgaaaaactaaagaatgccccggcgccaacgccaggacacgccgcgcgcgcgtcacccgagccatctcttgacccagccggcgctgtatatttacacacgttgcagcatcgatcaccacctgttcgatcgcgtcgccgtcaccggtaccgagctcgaattccggtccgggcctagaaggccagcttcggccgccccgggcaactttattatacaaagttgatagataaatcagatatctggttcctaaggacccggcggaccgattaaactgattcggtccgacgcgttacctaataacttcgtatagcatacattatacgaagttattagctaactaactagtaagcttcctagggtgcagcgtgacccggtcgtgcccctctctagagataatgagcattgcatgtctaagttataaaaaattaccacatattttttttgtcacacttgtttgaagtgcagtttatctatctttatacatatatttaaactttactctacgaataatataatctatagtactacaataatatcagtgttttagagaatcatataaatgaacagttagacatggtctaaaggacaattgagtattttgacaacaggactctacagttttatctttttagtgtgcatgtgttctcctttttttttgcaaatagcttcacctatataatacttcatccattttattagtacatccatttagggtttagggttaatggtttttatagactaatttttttagtacatctattttattctattttagcctctaaattaagaaaactaaaactctattttagtttttttatttaataatttagatataaaatagaataaaataaagtgactaaaaattaaacaaataccctttaagaaattaaaaaaactaaggaaacatttttcttgtttcgagtagataatgccagcctgttaaacgccgtcgacgagtctaacggacaccaaccagcgaaccagcagcgtcgcgtcgggccaagcgaagcagacggcacggcatctctgtcgctgcctctggacccctctcgagagttccgctccaccgttggacttgctccgctgtcggcatccagaaattgcgtggcggagcggcagacgtgagccggcacggcaggcggcctcctcctcctctcacggcaccggcagctacgggggattcctttcccaccgctccttcgctttcccttcctcgcccgccgtaataaatagacaccccctccacaccctctttccccaacctcgtgttgttcggagcgcacacacacacaaccagatctcccccaaatccacccgtcggcacctccgcttcaaggtacgccgctcgtcctcccccccccccctctctaccttctctagatcggcgttccggtccatgcatggttagggcccggtagttctacttctgttcatgtttgtgttagatccgtgtttgtgttagatccgtgctgctagcgttcgtacacggatgcgacctgtacgtcagacacgttctgattgctaacttgccagtgtttctctttggggaatcctgggatggctctagccgttccgcagacgggatcgatttcatgattttttttgtttcgttgcatagggtttggtttgcccttttcctttatttcaatatatgccgtgcacttgtttgtcgggtcatcttttcatgcttttttttgtcttggttgtgatgatgtggtctggttgggcggtcgttctagatcggagtagaattctgtttcaaactacctggtggatttattaattttggatctgtatgtgtgtgccatacatattcatagttacgaattgaagatgatggatggaaatatcgatctaggataggtatacatgttgatgcgggttttactgatgcatatacagagatgctttttgttcgcttggttgtgatgatgtggtgtggttgggcggtcgttcattcgttctagatcggagtagaatactgtttcaaactacctggtgtatttattaattttggaactgtatgtgtgtgtcatacatcttcatagttacgagtttaagatggatggaaatatcgatctaggataggtatacatgttgatgtgggttttactgatgcatatacatgatggcatatgcagcatctattcatatgctctaaccttgagtacctatctattataataaacaagtatgttttataattattttgatcttgatatacttggatgatggcatatgcagcagctatatgtggatttttttagccctgccttcatacgctatttatttgcttggtactgtttcttttgtcgatgctcaccctgttgtttggtgttacttctgcaggtcgactttaacttagcctaggatccatggttgaacaagatggattgcacgcaggttctccggccgcttgggtggagaggctattcggctatgactgggcacaacagacaatcggctgctctgatgccgccgtgttccggctgtcagcgcaggggcgcccggttctttttgtcaagaccgacctgtccggtgccctgaatgaactgcaggacgaggcagcgcggctatcgtggctggccacgacgggcgttccttgcgcagctgtgctcgacgttgtcactgaagcgggaagggactggctgctattgggcgaagtgccggggcaggatctcctgtcatctcaccttgctcctgccgagaaagtatccatcatggctgatgcaatgcggcggctgcatacgcttgatccggctacctgcccattcgaccaccaagcgaaacatcgcatcgagcgagcacgtactcggatggaagccggtcttgtcgatcaggatgatctggacgaagagcatcaggggctcgcgccagccgaactgttcgccaggctcaaggcgcgcatgcccgacggcgatgatctcgtcgtgacccatggcgatgcctgcttgccgaatatcatggtggaaaatggccgcttttctggattcatcgactgtggccggctgggtgtggcggaccgctatcaggacatagcgttggctacccgtgatattgctgaagagcttggcggcgaatgggctgaccgcttcctcgtgctttacggtatcgccgctcccgattcgcagcgcatcgccttctatcgccttcttgacgagttcttctgaggtaccacatggttaacctagacttgtccatcttctggattggccaacttaattaatgtatgaaataaaaggatgcacacatagtgacatgctaatcactataatgtgggcatcaaagttgtgtgttatgtgtaattactagttatctgaataaaagagaaagagatcatccatatttcttatcctaaatgaatgtcacgtgtctttataattctttgatgaaccagatgcatttcattaaccaaatccatatacatataaatattaatcatatataattaatatcaattgggttagcaaaacaaatctagtctaggtgtgttttgcaagcttaagccatgggtcgacggatccgttacctgagctgattccgatgacttcgtaggttcctagctcaagccgctcgtgtccaagcgtcacttacgattagctaatgattacggcatctaggaccgactagctaactaactagtacgtacgcgccgactagctagctaaggtaccgagctcgaattcattccgattaatcgtggcctcttgctcttcaggatgaagagctatgtttaaacgtgcaagcgctactagacaattcagtacattaaaaacgtccgcaatgtgttattaagttgtctaagcgtcaatttgtttacaccacaatatatcctgcca

SEQ ID NO: 318 - DNA, 1659 bp, Zea mays
  source 1..1659: mol_type = unassigned DNA
tcagtgtaattcactattctagcgaagggaagatgttttttcgaaccttcggataaagacattcgtccacgtcgcagtctaaatttgttacaaagaaacaaatcaatactgcggggggctactgttgggggccttctacctctgaaggtcctaaaaaatgtgactgactatatgttttcagtatgacatggattgttgcaggaggcttcaacttcggaataaagatctctctcgtgacaagggtaaagatttaacccaaaggtgataaaaatggacgacgaagctatagccacagaacttcggcttgatatgatgacgaagaccaagtataattatgaccaaaaaaggacaaagactacttagtccttaatgttttgtgctatgattgtagatggatgacaaggacatatatgtaatttcactcgggctgtgtcccgtgcctataaataaatgaacagtaccaccgtactattcacgtgaaattgtaatcacactctcgcgacttcatcttctaagcaagccgaaggtatcaatgtaatattaacattgttaatattttcatgtgttttacgaaatgtatatatatatatatgaattgatgaaatgcagcaattatcttcgttcgtttatatttttattcatatattgatctgatgaaggtatgtcctccttaaccttcgtctaatgagtatttcacccttgcggagataacgattcggaagacgaaggtccgttataattgacaattgtgttgtcttgttcttaattcatagtattcgagaacaagtgaccaacaattagtaattgctatgaagtaccataatttgtatggagcacatccggtttttattgatgcatgacatattaagcaatcactccatatttcttttttataagtttgagttcatgtgacttattttagaaacttgagctcacaaactttctcttatttggtttatgtatggtggaattatgtcattttataatcactgttcgttcagtcagtcgttgtgaactcttttctaatcgctctcttcattgaatgtgttgtaccaatacattgtatatattggatggagtaaacaataacatcagttagccaaataaaaaaatattatacggagagcggaaacaattaataaaaaaccttgaatttttttttggatagtttacatgtgtattgttgtaagccgtcgcaacgcacggacaaccgactattttttatttacgtttcagtaactccgactttttttagccgtaaaaaagtatgacatcagcatacccataacgtccatcagggtgcattaaggaagccgattctctgctctcttgttatatcgtattcctatgcgctggacctggctgctgcatgcatgtgatggtgaggctgtgagcagtctgtgatcggtgtagagcgacacgcgcggaggatccgtaaatcccggatcattgcacatactaatcgcaactaaccatgcagatttataggcaactgacccggtaggtttatttgtaggtcattttttgtttaacaagataacgctggacgcttatatcatgcgacactgacctataaatacatactacgcctgcacacctaggcattactgtgcctttatcttcaacccaaaccatccattaccatattcctaagctatc

SEQ ID NO: 319 - DNA, 257 bp, Zea mays
  source 1..257: mol_type = unassigned DNA
gatggttcacacagcgggctgcgggcccatcaaacacaccagattctgcagtcccaattgaaataaacgcgaccctagaaaccgcgggaacaagcgggcggaaaatggcgaatgcgtcccccaaataccgtgaaaccaaattcgtccacgggggcccatccatggtggagttggcccaggacgggcccaacgacacagcctttcttctgcctccttgggccgtccacacacacacacacactctctctctctctctt

SEQ ID NO: 320 - DNA, 5208 bp, Zea mays
  source 1..5208: mol_type = unassigned DNA
ggggaactagagattcgtccccttgctgatgtcacccagaatttgatccaccgggtggtttctttggacggttgcccggacttgagttggagatgcttgttgtgcttcttcctccttatcattttctccatgtgctctcccttgatccatgccttcatcttaaggtacatgttcctcatcttgagtcgggggatgcatcaatgttgaggaagatggttgatcttgatcttgttgttcctgcggtcgcacatcgtctattgccattgttcgcattgcgtccgttgaaacctcatcctcatatacatcatcaagataaacttgctctcttagagagccattagtctcatcaaatacaacgtcgctagagacttcaactaatcccgatgatttgttgaagaccccataagcctttgtatttgaaacataacctagtaaaaacccttctagagctttaggagcaaatttcgaatgtctacctttctttaccaagatgtagcatttgctcccaaatacacgaaagtatgaaacattgggtttgttaccagttaggagctcgtaagatgtcttcttgaggaggtgatgaagatagagccggtttatggcatggcaaaatgtatttacagcttccgaccaaaactgctcaggcgtcttgtattccccaagcattgttcttgccatgtcgatgagaatcctgttctccctctttactacaccattttgttgtggtgtgtagggagaaaagaactcatgtttgatgccttcctcctcaagacacttccacttgaagattcttgaacttagatccattgtcgctccttatcttcttcaccttgagctcaaactcattttgagctatccttaggaagcactttaaagtatcttgggtttctaatttatcctgcaaaaagaacacccaagtgaagtgaaaaaaatcatcaacaattaaaagaccatacttacttcccctgatgctaagataagcaacaggctcgaagagatccatgtggagtagttccagtggttttgatgtcgacatcacgttcttgctttgatgagtagttcccacttgctttcctgcctggcacgctacacaaggtctatctttctcaaaacagacatcggttagtcctaacacatgttctccctttataagcttatgaagattcttcattccaacatgtgctagacagcggtgccagagccaggccatattagacttggctattaaacatgcatctagatcgacattatttttagaaaaatcaactaaatagagcttgttgtctaatacacttttaaaagctaatgaaccatcacttattctaaagacatatacatcaatatttgtaaataaacaattgtatcccatatgacacaattgacttacaggaagtagattgtaaccgagcgattctactaagaacacattagaaattgaatgctcggtagtgatggctattttaccctaacctttaaccttgccatgattcccatctccaaagatgaacgtgtcttgggaatccttgttcttgacgtaggcggtgaacattttcttctcccctgtcatgtggtttgtgcatccgctatcaatgatctagcttgtgctcccagatgcataaacctgcatggtaatttaagcttgggttttaggtacctaactcttgttgaatcctacaaggttagtcacaaaagactttggaacccagatgcaagttttgtctctcttgcacttaggtcccaaatttctagcaactactttatcgttttttgcacataagaacaaatgaagcatcataagtttgataaagcatggttggtccatttgatgcattcctaggcgcatgagaagcaacatgatgaacatggcacctagttctatttctaccatgagcatacgaagagctagatgatgcaaacatggcatgagaattaaaaaccgcatcatgacgagtaggtaaaacaacatgattataacacctatcatgatgagcaacactagaatcattcttaacaccagcataaagatagtcatggttctttttgtcatgtgaagaatgagagctactagccataggagccttccttttctccttgttgagattggaggtcatttgacttgttaagttcttggttcccttttggaaaccaagtccatccttaatggaggggtgtctaccaatggtgtaggcatccctggcaaattttaacttttcataatcattcttgcaagttttaagttgagcattaaggtttgtaacatcattgttcaacttaagaatggtggaaatatgaatattgcaagcatcaatataaaaaactttacatctattacaaatagacacatgttccacagttgaactagccacatttaccttttctagcttagcatttaaatcaacatttaaactcttaagactagaaatagaatcgtgacaagaagatagctcagaaggcaataattcattttcttagtttctagagcaagagattttcaaacattaataaatttatcatgttcctcataaagaacatctttttttctaacaacctatctttcttattaagggcatcaattaattcattgattttatctaccttagatctatctaaacccttaaagagatcactataatctacatcatcatcagattcctcatcactagaagaagtatacttgggggtatctcgtgtacgtaccttcttctctttagccatgaggcacatgtgatgttcgttggggaagagggaggatttgtcgaaggcggaggcagctagtcctttatcgtcggagtcggatgaagagcagtccgagtcccattccttgcctatgtgtgcctcgcccttcgccttactgcagttcttcttcttcttcttccatttcttttcttgtccctagtcattttcattatcgagacattgcacaataaaatgtccgaacttaccgcatttgaagcaggagcgctttccccttgacatgttcttatttgggtattccgcgtcccttcaatgcagtctttaaacgcttgattctgatcccctttcccttataatccatctctttgggcggttagtcccttgatgaagagaacaattctgataccaattgagagcatctagaggggggtgaataagtgatcttgtaaaaatcaagactaaacaacacaaacttggtttataaatgttagtgaagtcaaaaccaaggtgctatgaatagagagggagagaactgttcacttgattattcctttagaaggtgtattgaacttaggaacaatagtgcaagtgattaagtgaaaactctaaggaagaaagcaatcacactagaaagatgtgcaagtgacacgttgttggtgacctccttcggtcaaggattgcactcaatccctctcaagtgatccaaagatcaaacttgagtaccacgattttcttccttttctcaagaattccctttgtgagaaatctccacaagttggagcctctcacccttacaagattgatcacaattaaaccacaagagtaagggagggaacagaaacacacacaagtgctagagtcgcagcaatgacatgcacacaagtcaagaaacgagcacacaacacagcgcaacgaggtcacagttcaaacaagtgctcaaatcttaaacacaatgaatcgaatgcgtgcttgcggagtctagacgttttttcaatggaggcttggtgtactgctccatgtgtctaggggtcccttttatagccccaaggcagctaggagccgttggagctccatttggaaggccattgttgccttctatccgtgggtgcaccggacagtacgcgctcgggacgcggcacataatcccatgattggccggtttccgcttctgggggcaccagacggtccagacgaccagtgcgcctgtcgaccgttggccagcgctgacgtggccactagtcgttgcgtggctgatacaacagactgttcggcgcattgcgcggaccatccggtgaattatagctgatgtaggctaaaaaacccgagagcagcgagttcggccgaaccgtgcaccagactgtatggtgggtggcatcagaccgttcggtgctacacagtctagcaactttttcctgtttcttcttttgtcttctttgtttcttttggacttcacttagctgggtcccctggcacttagacaaatatgattaacactcaaatcaattgacttagtgtctagagcataccttttagcttgatccatatagctttgtactaagtcctcttccgagctcattttgcctcacacttttgcttaacatcatgttagttcaaacatcatgtgttgtgcatctaatcaccaaaccaatatagaaatgcccaaggacacatttccctttcagtcggggggaggggggttggtggtcgacgccccggtacgaagtgggtgggggcaggcgagagggggtgcaccatgggccacccagtgcgtggtccgggttttgatccatgtaactctatataaatctctatttaattcggtataaaatagttaagatgaaagagagaataaaatttagtagatttgacagtcatataaaatttctagatcgacccctgtggtgggtgcgtcgaaatttctagacccgcccctaggccggggatgacacatggaaccgtgtatgcacaaagctgctgcattataattgtagagattaattatgttatttaggaaataaaagtttaggaatagtatataaaacaaggattgagctccagtatatataataggccgagtcctgtaattttgtgacatttttttgaaaccaggattgagctgcagtttttagtgttagagtccagcgtctcacaggagtggtccaattcaaattcgaaaatgtatcaccgctgaagcgaaaaatatcataaattcataacgaaccaaccgaccgttgcacggacgagaactcgacgagaccgaaccgtgaaaacaaccgaaagcacaggggctcaaacgaaacaatcccgcccacacttccttcgccggctcatggtggccactggccaggctgtcatcctgttctataaagcgagccgaggggaagagccggaaccctagcccagcaccgcagaggcgcagagacaggcgtcttcgtactcgcctatctccgcgactcaaagcttcttccatttcctaccgccgccgctgcagctccaccccattccgtcgacacc

SEQ ID NO: 321 - DNA, 10000 bp, Zea mays
  source 1..10000: mol_type = unassigned DNA
caaaaatttcattcctgcattaatgcatttttgttaaaactaggtgaagtgattttattgtcaaagagcttaaagcttaaccttgtaacaaggataagctacctttgtttcaaaggtggagggtccttaagtctctttgaaatccttaaggataaatgcttcaaatgattccaacatgctttcataagtgcatagtctgtcgtgagcatcacaattttattatgacacattgcatttcacagtttctatgataaagatatgttctcattaacctaattatatagaactgtttaagcttcattgacatatccttttaatcatgtctctttcctttggtacatttgcatatttcctatctctattgtgccaaggctaagactaatatgttttcatgagtatctcgtgtattaagtcttagattgaaagggaaatagagtattcggcaaagacatcgcttccactctatccttccttgccggtattccgtcagctctccaatttggtataatcttcactcatatattggttgccaaagggggagagaaaataaaaagggcttatatttcattcacaagtatccattttttggcgatttatgccaaagggagagaaagtattagcccaaagcaaaaggaccgcaccaccaccaatttcaaaaaaaaatgtgttcttccaatttgtattaaaagaaagtttttcaattggtatcttgcttttgatagaattttcaaattggtataactattaaaagaaagtttttcaattggtatcttgcttttgataaaattttcaaattggtataacctctttcaaaattaatatccaaaaccctcttgaacactaagaggagaatttcattgagggggagttttgtttagccaaaggaaaagcatttgaaacaaaaaatttcaaatcttgaaaatgcttctcaaaatcttattcatttacctttgactattttcaaaaagactttgaaaagaatttccaaaagaatttgcaaaacaaaactcgtggtgcaagtgtggtccaaaattttaaataagaagaaaatcatctgtgcatatcttatgtaatgtatattggtttaattccaagcaacctttgcacttaccttatacaaactagttcaattatgcatttatatatttgctttggtttgtgttggcatcaatcaccaaaaagggggagattgaaagggaaatagggtcaaacctttcctaaatgattttggtggttgaattgcccaacacaaataattggactaattagtttgctctagatcatacattctacaggtgccaaaggttcaacacaaaccaataaaaagaacaagttaggcttcaaaagaaaggagcaaaaaggaaaccgaagtgttccctagtctggagcaccggactgtccggtgtgccagggtgaatcagctcaaactcctcaacttcgggtttcccaggcgcagctccgctataattcaccggactattcggtgtgccatcggtctgtccggtgcaccaggagagcaacggttatctgcgcgcaacggtgactctgacattgaacagtacagaacagtgaacgcggcagaagtcagagcagcaggttagaggggcaccggactgtccggtgtgacaccggactgtccggtgtgacatgaggatagagcctccaacgttcgaccagctacaagccctaacgacagaatgacgtggtggcgcaccggactgtccgatgcgcccattgccagcagccttctccaacggctataatttggttggtggctataaataccaccccaaccggtcacttcaaggtgtgggagcccaagcaacattccaagtcatatagttgacatattcaaaccctcccaaccacctctattcattgatccatcctatacacaagatttagaccactacaaaccacacaagtgccacaaaagaaagagcaagcaaaagagagcctcttgtgagagtttagctctagtgccttgtgagattcattgagagaaagtgtgtgctacatcttgcgttcatttgtgcgtggagttttgactcccattgaacttcctccaaagttttggaggcttgtaaagctagcaagagacacctaagtgtgtggtgatccttgcggggtcttaagtgatccttgagaagaagaagagttcgccgatctttgggatcggtggagagagggaaagggttgaaagagacccatccttagtggactcctcaacggggactaggccttcgagggccgaacctcgataaaacaaatcacccgtgtctcgtgtgtttattgcttgtgatttgtttgttctctccctttctaagttctcttgcgctactctctgctaacattattttgtgtttgaaagtcgcctagaggggggtgaatagggtgaatctaaaatttacaaacttaatcacaactacaagccgggttagcgttagaaatgtaaacgagttcgagtgagggcgtgaaaacaaatcgcaagcgaataaagagtgagacacaaggatttgttttaccgaggtttggttttcgcaaacctactccccgttgaggtggtcacaaagaccgggtttctttcaaccctttccctctctcaaacggtccctcggaccgagtgagcttctcttctcaatcaattgggaaccaaacttcctgcaaggaccaccacacaattggtgtctcttgccttgattacaattgagatgatcgcaagaaagaatgagaaaaagaagcaatccaagcgcaagagctcaaatgaacacaacaaatctctctcactaatcactaaagctttgtgtggagttgggagaggatttgatctctttggtgtgtcttgtattgaatgctagctcttgtaatgtagttggaaggtggaaaacttggatgccaatgaatgtggggtggttggggtatttatagccccaaccaccacaaagtggtcgttggaaggctgcaatcgcatggcgcaccggacagtccggtgcgccaccggacactgtccggtgcgccagccacgtcaacagaccgttggggttcgaccgttggagctctgtcttctgggcccgcctggctgtccggtggtgcaccggacagtccctgtaggctgtccggtgtgccacccgcgcgtgctctgctcctctgcgcgtgcaggcgcgcatttaatgtgttgtagtcgaccgttgcgcgcgaagtagttgttgctccgctgtcacaccggacagtccggtgtgcaccggacagtccggtgaattttagcggagcggatttccgaagctggcgagttcagagtcgctctcccttggggcactggacactgtccggtggtgcaccggacagtccgatgaattatagcggagcgcctctgagaattcccgaaggtgaggagtttagcttggagtcccctggtgcaccggacactgtccggtggtgcaccggacagtccggtgcgccagaccagggcacacttcggttatcccttgctctcttgtttgaacccttttcttggtctttttattggcttattgtgaacctttggcacctgtagaacttatagactagagcaaactagttagtccaattatttgtgttgggcaattcaaccaccaaaatcaattaggaaataggtgtaagcctaattccctttcagtgttgcttcaagttaaattcttatttagagaagcaactccttgcaagaaagaacttgtgtttattttcttcttaactaagccctcttgcattattctccactaacatttctaatagtattgttattgattaaactccgcactccttgaaaacaatactcattgcaagcaaaggtttaagttttatactccgataattgtggatcttgttctaaccactaatcaagggatctagtttgtatttagagctataattttcaggtttcgcctatccacccccctctaggcaactttcagtatctattaaaaccctcttgaaatctaagaggagaatttcattcaaggggagttttgtttagtcaaaggaaaaacatttgaaacagggggagaaatttcaaatcttgaaaatgcttcttgcaattttattcatatacctttgactatttgcaaaaaaaactttcaaaagattttccaaaagaatttgcaaaaacaaaacaagtggtgcaagcgtggtccaaaatgttaaataaaagaaagcaatgcatgcatatctagtggaattataaattggtttaattctaagtaacctatgcacttaccttatgcaaactagttcaattctgcacttatatatttgttttggtttgtgttggcatcaatcaccaaaaagggggagattgaaagggaaatagggtgtaaccttttcctataaataattttggtggttgaatgcccaacacaaatgttggactaattagtttgctctagattatatgttctataggtgcataaaggttcaacacaaaccaataaaagattgaagaaagggttcaaaaataaaggagtaaagaaaccaagagtgccctagtctggcgcaccggactgtccggtgtgccaccagactgtccggtgtgccaccggactgtgtccgtgcaccaggaccgtacaacgtccaactccttactctcgggtttctcagggcacgctccgctataattcaccggactgtccggtgcaccggcggagcaatgactccttcgcgcaatggtcgactgcaaaagctgaagattcggaggaacagtgatgaacagtacgcgcagagtcagagccgcccgttagaggcgcaccagacactaaacagtgcctgtccggtgcggcaccggactgtccggtgccactagaagacaaagcctccaacggtcgacagcgcccgaaccctaacagttgggcgacgtagctggcgcaccggactgtccggtgcgcccatcaacagcagccatccccaacggctatgtggtggttgagggctataaataccccccaaccaccaccactccaagcatccaagatttttgaacatcacattcaatacaagggctctagcattcactcctagacacaattcaaaagatcaaagcctctccaagtcccaaattcaactcaagcacttagtgacttgtgagagagagattttgtgttcctttgagctcttgcctcttggattgccttcttcctttctcatttcttttctcaaagtgatttttactcgaagcaagagacacctaagtgtgcggtggtccttgcggggtctaagtgacccaggagattaaggaaaaggctcactcggtctaagtgaccatttgagagagggaaatggttgaaagagacccggcctttgtgaccacctcaacgaggtctaggttctttagaaccgaacctcggtaaaacaaatcatcatgttcatctgccttatttcttggttgatttgttttcccctctcttttggactcaaattcatttctaacgctaaccccggcttgtagtgtgtgcttaagtttataaatttcagattccgcctattcaccccccccccccctctaggcgactttcagatatgggctgaggcaggtaagaatgggcccagatgctggtttccccttttgtttttattcttttctgttttcttttattcctaattcatttgaatttatttttttgaattcaacttaagtgtaaattcaagttcatgttaactatgcaatttggtcacaccaacatgtggtgaagttatttaattataacattattttatattgaataatatttctctccttccttccctattttcaattcctttcatattttgtatttctattttgaattaaatgtatacagagttcaaacttagatccaatgtacaatctcaaatattggtacaaacaattttatatttacttatacatccatatcctttatttttgtgtggtttttccttctctttctcaaattctaggatttcttttagaccttaaaattctactttggactttaataaattttctttttacattacaaaattccaattccaatataggatatagtttaagaattcaaacttaatacatactcacaatcaattatggagcaatagatacatatttattttaattgatttatttgcttgataaatgtttgaaatatggcacacactcatattgttcctttctttttaggagaatagtattttgattgtgggacaagagtcaaaagttagtttaaaattaaatattcttgtaaataaatgcttatggtgcatcctttaatgaaatgcataatcattttgttgaattgaaaacctttctactacttcttttctaatataattattggttttcaaatttcagtcctcaattttcaatactcaaatataatttgtgaaatctgaattttccattttatttcttcatatattttattatttttataccaattttgggccttacagaaaataaagaaaataatgtagaaaccaaggtgtaggaaacagtgtcacttaagagggagtggattaggcttctacaaactccactctaaactaggccacaaataaatctctagaacaaaacctattcaacaaatgtaaactaaattgtgcaaactatgttttgactgagtgttgatatctctaccgcaaaagaagttttacaacctaagttccaattattaaagaagagattaaaacttaagtacttagtgtaaatgcggaaggtaaagagcaaaggtagagatgcaaactcccgttgacgataccagtaattttatcgatgtatccgaaaccacgcaaggttctcactaatcctcgttgatgcccctacgcatagggtagcccacgcgaggaccaaacaccacggacgatatcatgtcgtcctaaatgccatgtatttaaaaatggagggagtatccaactcccaaattcgaatatatgctcatttgggttattatgtggttttgaaggaagccatggatataaataaaaaggtcatcttcaggtgagtggattcatctcttcaatccacaccaaatatgttctcacctcttgtacatttttaacaacaaatgtgttgttttgtcccatgacatgaacaaggtcttcatatgtttctagtaagcggatgcgggaggtcgcatgtccaatctacatggtccatcttcaggtgtctattttttcgtagcaatacacctcttctgaattatgttacaatctaagggtagactgcaaaaaaccatgcagccatgtacattgccatcaacaaaaatctataacagagacatttttatactatgatcaatatacatttatatctacaacaatacttgttcaaaaatctgtaaacaggtaaaaaccacaatcctatgtaacttagaaagtcatgattaaggtgatcactgaaacaacccggtttctatgtccaccaggattgatgaaataggggcgtccattgtctatgtgtcgcatgcacagtgtctccctccctcacaatggttcatgctccccaacctactccactaccttcgatctccaagcacaacgaccctatcgctatgcatgcccaaccactccacagtctcatgattccacccacaactgggccagggacctccttgtaaccctaccatatctttatagatgaaggccaccaagatccctcctccggctcataaaaaacagaggacttactggtgactggtgacacgcacgagtagaccagtggcgaagctttggcgtccgcacgcgtggggcggagacagaggaagagtggatgggggtcgcgtccctcgtgggcatgacgcggggatgggcagacgcatggggagacggtgtctatcgcagtggatctcgagcgagcaggcagagacgaagatagaggaagagtggatgaggatcacgtccctcgcaggcatgacacggggataggcaggcgcacggggagacagtgtctgttgcagtggatctcgagcgagtggatgactgtcttcgggggaaaggaggcacggatgacgggggcgtgcgcaggcattgtggccatgacgttggaatcgtggggacggggcgcacgggtgggggcaggcgaagccatgggtgtggataccttcgttgtactcttaaaatttcgtagatatcaacattataaattcgaatttattattgttctcttcaacaaccaactccagaattgaggaaccaagttataaccattgtggaaaatcatgactttgtaggattcagaccttcggaatagaccttcgggggcaaggggctaccgttgaggatttcaccacaggtaaacgtgtctctctcgaaaattcatagttaactaacgtgcatatgttgtcaacataggtttgcataattgactttgtgaccattaaggcaatcaaaagtaagaggaacatactaactcgcggacacgaagactccaacctctgcccccgaagctctggtagcgaaggcaaaggggcacgaagcctcacgtatgaaggctacacacgtgaagcctcacctatgtgaatcacgtgcaaggaagcttcaatgaagggaagtaccctaggccatctccagcgggtcatgtaaacggccgtacaaagtactgtttagattgtattgtttgcagagcagaatttgaactaaggagtgaaatagggagtgaaatagagagtctacggagaatacctcgtttgaggcacagacatgctcacgatgaccaaccgtccatagtggcctggttggatgagagatggatagtgatcatatcaccatcgtgcagacgaattgttataatcttatagttgggaggtcggagtcttttttatatatggattacaaagatatagggatccctataaacaccctcagtatatactgtttattagggacatggcaaattttatccaatacattacagggtatattcgcattctcccccatgtactgtaatgtactgtttgggtccgttcgataaaaaaaaatagatggggtggtgggaaaattaatgtctctagctctaatcatcttacgtctgcacgcgtcttgtttggataaaatttgtatgttcatcagtttgcatgcacctggtttgggtttgggtggaggcatgaacataaaaactacccaccctagatctcgatgcaatgcagcataccgaaccagacgcaggaggaggcgccgatgatgacgatggacgtgcactttgcttgctccggactcaaacgaagacagcgcgcagctcacctcagatctccccaccgacacacacacacacacaccaccaccaccaccagtttggaactttgcatgcatccatgcatgagcgagtagcacggatctacctccaacgtacagcagggactgctatctcgtagccgtagagcagttcagggtgcagaccggatccgttcggttatttgtacatcgtccattctttttttacttatagtcttttaatttaaaaataaattagcaacgataaatattcgaaaaccgagttatttctatttctacaggggtaggggggagaaacaaatacgcgtccgtgaataaaagatcaaaaggaatcgatctaccaggcttattttacggggaaattacgaggctatcgatagttagttacaggataagggggattggcgcccgaaatcttcgcctaccgaccgctggaccccgcgccaccgcacgccctgaccaaccaggcgggtccacagggcagagaccaaccaggcgggcccacagggcaaagggagagaaaataaaaagaaaatatatacgtaccagaaatttatctattttacgggcggataaagacgggcggtaaatcctagtcccatccaatcccgtcacgttcggcgaaacccgggttataaaaccggagcacctcgccccccctctaccaccaccgcagccgcagcacaatcgcctcgccttcccttccccaccagcccgtctctctcttctctctgactctctctctcgtagccgcgtccacctcgcagcagcaagcaagcgcgaccaa

SEQ ID NO: 322 - DNA, 943 bp, Zea mays
  source 1..943: mol_type = unassigned DNA
tttgtatcatcattcatgtttatactgacacatttcggataaggtatgtgcagtgcaacagacagtttgctgggtacctttttctgaatacattagttgttgtgtaccaatgactctgatcagtcgcgcattgttttacatctgtgctgctgttgtctacggccatatcatctggacatagcacatgtatcttgtatttgagccactggcatgaacacagtcgagtgcactaaaggactagacatactatcatggtatcccaagcacgctcttttatccaagtttcagagtgtctgatcgcgtcaatcattgatacaatcaggctatgacctagctcgggggctggcggtggtggccttgcttcagatttgggtgcgcaacagttcatgtgtaactttgcggttaggtttctctgggacaagcataaagtctaggcttctggtatgatgttgtttctggctgcttctacttgaccacttcactgctggctatagttgcagttgatctgctgaagtaacgtcatttttttaggctcgggttcctttgtaagttgctactgtacatactctcctggggcagctacttcttgatatatcattgtacttttggctacctaccccaaatctttgcaaggttgatctatttagtagtatttggtttcgaaatatggtgggatgaagccgatttgcttataatttgttattgtttggatcagttttacgtaggatagagtgactttgaaaaagaaaacaattatgctcaatactgacgcaaccgctctctagtatggagacgtttcatttggctttggaaccaagcactaactaaaaaatcgacatgcaagagcacaatgccttaagctctggtaaaaatcctcttagatctcgatttatcgtgcgctattcctggacacacaaatatatgccgatcaaagaaaactaca

SEQ ID NO: 323 - DNA, 1739 bp, Zea mays
  source 1..1739: mol_type = unassigned DNA
ccttttgaaagagactgtcactatgtttccaagttactatagaataataatgggtcatttggaaacatgccactcaaatttttgaaaaattggaaactagttcattttcatgccactacatagcatcaaaatgaactagccgtctaattttgtaaaagttgagtgtcgtgtatacaattaatcctatagcctgtttggattagagatgacaatgggacccgatccccgattccccacggggaattcctccattaggggatgaggatggggacgaaacttcccccacggggatataaacatggaaaaatatatcccccgacggataaatggggatggggacggggaatcattccccgtgggtaccgttaaacttgcacgtgactatgtttttgtgtacaagttaatgacaaaaataaataattaccttatcaaaataacactaattgtacaaatatgttcattttgatgtatgtataatgatttcttatatctgacagattgacaatgtgtataagtgacaatgtttaacattaataacaaaaaacgtaggtcttaattataatttaaatggggatgggatcctcgttggggatttatccccgcggggaacggggatggggaagaaatgttccctcgcaaacattcgtgggggatcccccgcggggaaattttttcgtcgcggggacgaggatgggggagctattctccggcgaggaattccccgttgccatccctagtttggatgttgatatagaacatataattgggaattagaatcaactttcctaaattctattgtttggttgcacacggaattgatatttggaatcggagacccaatttcctagaattagactataactagaaacttcatctcccaatacagagcgttacccctctgtattgcgtggaattagaccgcacaatttcagacttcaattcaacgacattcaaacaatagaattggaattacatctcatttcaataccctatctaatttgatattaaacccaattcagttacatgccctccaacaccgacatcaaagtcatcataaaccattgttgcccacacaggcccgcagcaacgtgcagcgttatatatttatacaaaccatgtgcatacctcacagcaacgtgtagtgtctggtccagagaaattgagaacgccgaaacagaatcaggggcacagtaattactcccccagacccccaatcagtgacctcctaatcacaaaacactaacggaaaggagacagtaagattggcggagtcagaggtaccgttcgcctgaccttagtggcgacgccgagatcctccgacgccatcgtcctgccccgctctctccctgcctcctccctcggagaataccatcagcaatcagtccactccgggctccaaatccaccgcaacccctggatccagtggcccgagcgccgggcgcaggacgacgacgactcccttctcctctctctacgtcctccgaggcgagagagtcgggcgaaaatgacggggggccgcgcgaggcggctcggtgatggggtgggaggcgggcgagcggctcggcgcgggaatttagcatcgatcggggtcggggcagagaaagctggagcgggactgcgggagtggaggagaaccccgggtcgggaggccacctactactccgctcgtctgttgctcggggaggcggacggcctgcgacgcgttccgttccgttgccgtttgtcctttcgtgacgccc

SEQ ID NO: 324 - DNA, 10000 bp, Zea mays
  source 1..10000: mol_type = unassigned DNA
ggcgccaggggcttcggaggaagatttggcgatcaaccaagaagaatcttttgcttattctgtggtgagaacaaaggccatactaccaggatgtgccatgttactatacagaagcaaaaggaaatagctgaagcagcagcacaacaagcccagccgaagcaggtcatgcatacagcttcgtatcattcgccctacatcccagaatatgtgggcaatcatcctgtagtctctgctgcttcggcaagtcagccttcagcttcctggcaacagcctccgcctccacctccgttgcaacaaggtcagcagccagaagggagccaatatgctccacatcaaagggacttcagagaacagtccgaagctcgcacggtcaacagcactgtgccagaatcaaagcacatctattgacaaatatcctaccttaatagcaatctttttcattcagttttattctctgtaataaaggacattgttttcatgtaattagtttcgttgattcctacaagaaaaatatgttttcttcacaggtttgcgacaataaaaaggaccttcggactatcgaaaatcctttgaagcaacgaaaagtcgttctaagaaacgcagagtaagtctgacgaagtcacaaaaagtcgttccgaagggagcgcagcgtaagttttctgctccaaagtcgttccaaaaggaatgcagagcatacagcgaaaagtcaacgctgataccgcctaagtaaaaggcgaagaagctccaaagacgttcctaagggaatgcagagcttataccgcctaagtaaaaggcgaagaagctccaaagacgttcctaagggaatgcagagcttataccgcctaagtaagaggcgaagaagctccaaagacgttcctaagggaatgcagagcttacagcgaagaatcagtgctgatacaaaaatattgtgtggggatatgtgtgtatctttcggaacaaatgtcatctacgtagcataacatcattacatcattttgcatagcataagcatcatacatcatgttgcatatggcccaagaaggggacacgatattgatcttcggaagtatgatttgaaagagtgaaaatcgtggtcccaagaaggggacacaatattgattttcgaaagtatgatttgaaagagtgaaaatcatggtcgtaaagagaatcaatcttcatcttcggaagtatagcttcggagaattttttcacgaagtttggatattcttcacgaagcatgaaaagaagggaaggtgtttttttcgccaaactcaaaaacggtacgtgtgtaaagtttcatgcatcgtaaagaattgagtagcaaaaatagatatattacattcggggttacaaaaatgttacattatattacatttccgaagttttttacaaaaatgtttaatcctctctcaaaacgactcctgcagcttcattcagaagccgattgacgacttcgtccataatatcttcggccatctttttaatttcgtcgtcccccttcggctgagggcccgaaggcgctttagtcggatctgaagcaggacacgactacattactattacaaatcgcaaacaaatcttaaaagcctaaagattacaacacggtagaagctattatttagtacctaattgaccttcgggctctgtgctcttttcagcagccttagccacttctctagcatcatggatgcccttttcacttctctgaataatttctcttgccatttctcggccaccgttgtcccagatgtcggtgaaaaattttcccccaaccgcgctagcttcggctgaaggatcttttatatcttcagtcgacaaggtggcttcggactgtgctaaaattttcacatgttcacagcccttcttctctaaaatagtggcaatccctctggcgccagagaaggcacatatatctcctcggctatttaaaatttcttcgaaggcttcagcttcgtggtcaatccattcaatgacactttcgggattgccccttagaaaattttcttcacttgagaatgcgccgaccttggcgaagctagcctttaattttttaacacagtctatagatttattgtagcatctctttttggatgaacgaagctcttcaacagtcacttctaggtgatctgcccattgatcgctgagttcacgctttgtttcttcaagtatacgttcctctgtggctctggccagttgtttccgaaggtcttcaatttcgcgtttctgagcttcagcctgacttttgaaagcagcttcgtcctcctttattttatctatcaatgagtataatattttgtctttttcgagaccttcgttcctcagttcaattacttcggaacgaaggttgctcagggctatagtacacccttcgtcttcagtatctttctgggctctgagagcattgctaagaatcaagccctgcaaaaaggaatatgtgtgtgtgtcagagggtttatatgaacggaaaaatacaaggatttcatttatcatacctttaaactgttataagctaggctgtcagccagatcgttttttgatagcaccgaaagcccgtcttctaaagttgggaatccgaagcttctgcttatctcccgacagacagaaatttccttgttgtcgggaagacagtacaagaagtcttcttctccactgccattaaatattaatgctcccttcggatatttcagtttttgggcataatgctgggcctcttgttcttctttttctgataattttctccccgaagcatgacgaaaaatataatcacgagtcttgggggatgcttcgggggcaacaacactagattcttcaatagttggctttgttattttctctgtctcactttccaaagtttttgcgggctctgagggtccagcttcggctgaaatctcttgctctggagctgtagaaccagagatttcagctgttgtttcaggagtaacagcagctttcttcggaggtgtgctcgaagatttgatcgtttccaatacgtctagcacattagccattctttttctcttcggagttgcagctggcactttttcattttttgctgtcccaatgattgctgtaggactcaaaacttctgatgttttggagccctcagttgcttctcttacctcctcaattttttctgtgagcggcgcttcggttttctcttttgtttctggcaacaaaatatttgagtgttctgattccatctttggtggcatttcggccgtttctgcgatctctggcaacaaggctggctcgattagtttttcagcttcggtggctgaagaagttttcccggtaaactccggcaccgaagctggttcaatataacgcggccggtgcgtaagaacctttatctttttccttttcagttctggctcgctaggagcagctgcagcttcttcttttgcagagattgtgttttttctcttctgccttcgaatgggatagcaataatcagggtagaagaacccgattgcatcaaacactcggttcagtctcttcttttttcggcctccgaaggctgctgatagtgcagtattttcagccttcgagaatgccccaagtaattcatcacttaatgtttcaatgcttttcagccagtcatcatcaggttcaataaatttatctgcatatttgaatgtgtattttaatctgactagtccgccttcgtcggactctttgatggtttctttcggcatttcccacttttctgcaagtggccataccctgaaggcaatgtgctcctggaccaagtcccttgacccaatgaaggagcagactgcgccgaaggctctttggcattcttcggctgcctcatccatttcaaccttcggccttcgaagcccgaagcgttgccaaattgggtacataatgatacttttgacattattttgcgctgttagatcatttttcacataaaaccattcagacatccaggctccgggccacctcttccgaaaggttggcacagggtagcttgacccggagcgggcgccgaagctgtagcacccaaagttgttgtggtattgctcctttccccagggcttcgtctcgtacaataactcgtgtatgttgcagaagcttttagcgtttggctccaaaccttggcttctcacagcccagacaaaaatccccattcttataatagcttcgggagtgagttgatgaaggtagatttggaatgttttcagtacctcaacaacaaaattgctcagggggaatcgaagcccagccttgaggaggcttcggaaaatcacaacttcatcttcttcaggggtgggagaagtcttttccccggcatcagctctcacaatagatatgtctcggaagtatcgccccctcatattatcaatgtgactctgcttgatggttgttttcccaaaaactgagtgacttggtcgccacggtcgatcttcggcctcttccccatcactttccacatcatagctgtcgctgtcatcagtatcttcggacaaaccttcaagaatctccttcgtgattttctctgtattagtctctgccatcgctatcaggaaccccagattcttctcctcctcgagactcagcttcgtctcagcagggatcttcttgtcttcagacatcttcggaaacactaaaaatttgttcccgaggccgaagcttcgaaatcaaaaagaccagcaaatctcaatgagcaagagctaaaaatttttagtgggccgaagcaaaaggcaagcgtgtgtaccaaatgaattcacgatgtgttcttatttatacgcctagggcgttgaaagttaaaaggccccgcttgtcagtgaatgttgctattctagcaaagggaaggtgttttttcggaccttcggctcaaggccttcgtccatatcgcaatctgaatttattatttacaaattaatattgcgaggggctactgttgggggccttcgtcctccgaaggtcctcaaaaacatgatttgacaatgttttccaagtgaattatatgaacaggtattttcggattcagaattatggatatggagcacgaccaggacgaaggctgagccagacgaaggtcgggggcagccgaagctgtacgcagggaagcttcggcgcgatggcacaagggggaaccgaccttaagatgaaaagacttcggggtcctcaatagatttccataaaccgttaacaaatgtaatggacatggatgtaattttacgtgggctgcgtcccgcgtctataaatagatgaacagtactcccgtactgttcacgctgactttacatttgcttttgcgtcacgcctgtactttttaccttctctcaggaccgaaggtacatttgtaatttgaaatcatttctattttctcatgttaataaaatagaaatgattccatgatgatgcttatattatatctcatgctttatatgagtctttcgttattacctattatatttacgaaggtatgtctcttatgaccttcgtccgaaactcattatttcccgaagggacataatgcttcgaaggacgaaggactttaacacttaacacttttcatgttgccttgttcttaactcttagcatttgagaacaagtcaccaacaaaccttaacatgctttttgttcttcttaataaggaagtcctcttggctatccaagagttcatccttctcatgaatagaacctatcaattcatttaatttttccttttgttgcatgtttaggttggcaaaaagggcaagcaaattatcttcatcatcactagagttttcctcatcactagatgttgcatatttagtggaggctctagattttaccttctttttgtcgtcctttgccatgaggcacttgtggccgacgttggggaagaggagacccttgttgacggtgatgtttgcggcgtcctcgtcggaggaggagtcggtggagctctcatcgaagtcccactctgggcaaacatgggtatcgccgcccttcttcttgtagtatctcttcttttctcttctctttcccttcttgtcgtctcccctgtcactatcactagataatggacatttagcaatgaaatgaccgggcttaccacacttgtagcaaactttcttggagtggggcttgtagtccttccccctcctttgcttgaggatttggcggaaatttttgatgatgagcgccatctcctcattgtcgagtttggaggcatcgatggggagcctacttgatgtagactcttctttcttctcctccgttgctttgaaggcaacgagttgcacctcggttgtggaggtggcgcctcactcgatgattagtttggagcctttgatcatcaattcaaagctcacaaactttcctataacttcctcgggagacattagcttatatctaggatcaccacaaattaattgaacttgtgtagggttaagaaaaacaagtgatagtagaataaccttgaccatttcatggtcatcccattttgtgctcccgaggttgcgcacttgattcaccaaggtcttgatccggttgtacatggcttgtggctcctccccttggttgagcatgaatcgaccgagctcccactcgatcgtttcccgcttagtgatcttggtcacctcatctccttcgtgcgcggtcttgagcacatcccaaatctctttggcactcttcaacccttgcaccttattatactcctctcgatttagagaggtgaggagtatagtagttgcttgggaattgaagtgtcggatttgggcgacttcgtcctcatcataatcttcatcacctacggatggtacctgtgctccaaattcaacaatgtcccatatgcttgtgtggagtgaggttaggtgatacttcatcatttcactccacctactataatcttcaccatcaaaaaccggtggtttgcctaatgggacggaaagtaaatgagtatgtttagaaatgcgagggtagtgtagggggatcttactaaacttcttgcgctcatggcgcttagaagtgacggacggtgtgtcggagccggaggtggaaggcgacgaagaatcggtctcgtagtagaccactttcttcattttcttcttcttgtcgccactctggtgcgacttgacgcggggaggtgattcctccctcttattgttgccggactctcccgatggagctttcccgtggcttgtgacgggcttcttgccggtcaccatctccttcttggcgtgagctcccgacatcacttcgagcggttaggctcttaatgaagtatcaggctctgataccaattgaaagtcacctagaggggggtgaataggcaaatctgatttttataaactttaagcacaactacaagccggggttagtgttagaaataaagtcgagtccaaaagagagggtgaaaacaaatcacgagcaaataaagcgaatgacacggtgatttgttttaccgaggttcggttcttgcaaacctactccccgttgaggtggtcacaaagaccggatctctttaaaccctttccctctctcaaacggtcacttagactgagtgagcttctcttcttaatcaattgggacacttagtccccacaaggaccaccacacaattggtgtctcttgctttgattacaaatggcttgggaataagaaatggggaagaagaaaagtgatccaagcgcaagagctcaaaagaacacggcaaaactctctcttctagtcactaattgctttgagtggaattgggacttggagagattttgattcaatctatttgtgtcttgtattgaatgcactagctcttgtattgaatgtgttggctgaaaacttggataccttgaagtgtggtggttggggggtatttatagccccaaccaacaaagtggtcgttggggaaggctgctgtcgaagggcgcaccggacagtccggtgcgccactggacactatccggtgcgccagccacgtcacccaaccgttagggttctaccgtcggagctctgacaagtgaggccatcggacagtccggtggtgcatcggacaatcactgttcactgtccggtgcgccttttggcgcctgctctcacttctgcgcgtgcagtccgcactgttcactgttactgtacacttttgcagacgaccattggcgctgttagccgttgctccgctggcacaccggacagtccgacgctacatccgacagtctggtgaattatagcggagtggcattcccagaaacccgaaggtggcgacggtgcgccagaccagggcagccttcagttggttttgctcctttttatttaaaccctttcttggactttttattggtttgtgttgaacctttggcacctgtagaacttataatctagagcaaactagttagtccaattatttgtgttgggcaattcaaccaccaaaattatttaggaaaaggtttgagcctatttccctttcagccgccacccttgccgtcgtcgtcgccattgttgccatcgtcctcgttgcatgctcacgatgaggttgtacctgatggatcgcgcagagcatgctcacgatgaggttgaggtatggcgtgttctgtacgacttcatcctctgtcaatgctcttgcgtcaccttccatcatgcgtgggcatgcaccaggtatggcgtgttgtcatgtactttctggtacattggttgttactatggaggctttgttgctgtggtctcccttggtactgcatacatggcctaaacacggttgggtgatgttgtgtcttgtcgcggaagtcgtggatcgatggtgtctgtctgggttccctccttgcgggttcgcgtggcggggactcgatcgtccgtcctgcctcgtaggcttgcctgacgaggacttggtcgttcgtcctgcctcgcaggcttgctcggcgaggacttggtcgttcctcccacctcgcggacttgctcggcaaatgggtcgtggagagtatgggcctcactatgggcaccccatttcctggtacccgacatagtgactaaaagtgactaaaatgagctttttaccccaccacctgccctcccccacgtgagctatgcgctgaacgagcaaagaagtaaataggggtaatgcagtaaatatacgtagtagttaatgctctttagtcagatttagtcactgacaccaaacgagatactttagtgactactaaagtttagtcaggtgactaaagaaaccaaacataacccttagtgtgaaccgatttaggcacactagcatatatcccgtgttaacgctacgatcttgaagagggaggagtcaacgacggcggtggcgcaagtggataagttgacgacagcgacgatgacaatgtgagtgaggagaagggggcagtggggacgcagaggatggaagagggggagggggtggataggggcagcagggtgggaggagggagagcgcgagtgagggagagagggcgccgggacgcatgggaagaggaagagatgaatcaaataatattatatattaaatttgagtaagtaagagagatttatctaacgatccgaattgttggttttgatgatctgttaagtttaggtgtaatttgtttgatggatttagtgatgattatatgtgtgggggtgatttagtttggttggttttacaaaagtttaaattttttttagattatatagtggtatagatagtcaaacagtagcggcaatgacatcacggtaaatgcgcgttggcatccaaatgcagctggacacaggtcacacagcctaacggatatatcatatatgtgaatcctaactgtacactgtctgaagtggacgaacggctctggcttcggcgtgttacgtgtatagtaggccccttttgaacgaacggcgcgggccggggccaccaccagcatctgcggcagggagaatcgcgttggttcgacgcaaacgctacccggcgcccccttgcccttggggccggctattttaccgcacccgttctcccctctctaccgcagatcagatcacactcgtagagagaaggaaaaatatccccaaaccctagctcccgatctcg

SEQ ID NO: 325 - DNA, 10000 bp, Zea mays
  source 1..10000: mol_type = unassigned DNA
caagtctcaataagaaacaattaaaaattgatacaaaggcaaaaaggctaacccctcacaatgtttttaacttagggatgtttcaagatgacaacattcatcatgattttgacttcctacttttccttgtctcaagcacctcgcctgcagaaccaaacagggtctaaatgtggttatattcatgttgagacttttttcactcatgtaaggttcattagaatgatttgcatgatataaatggaacttctgttagtccaatgagaccataactgcatgatcatgtacggatgcatctaactttgtaccaaactcttgccaggatttacttgatgatgctgagcaaagtatgatagagtacaaaatatctattcagaatttgaagaaagaatcaaaatacactcttgacaaagtagctatcggtgaaagtgatctgtagcgtggacaaaccgatttgaggtattttacatgaaccttggtcggaaaaacctgtttttccatgtctgtttctgtttcatttaataatggctcgtcaccaacatactgtaaaattattgtctgtgcctctcaccagatctactgggaagcagatccaatctcttataggttccatttacaaagcagaatccacaactgcaggtattagtatttcttcaggttatttggccaattatttacagtggtctacacaacggtgggtctagagtcattttagctttgtccagtcatatttctctagctttgacaagtttatacaaaaatacgttagcatctaaaatatcaaataaatacactatcattccatggtgtatctaatggtttaatgttgtcgattctgcattttttaataaacttggtcaacgtagagtagtctaaattaggacaaggctaacataacttgcataattgcagttggaatagtaatcaaaaccttcatgtccacgacttgcacgtaatcaagcaccaccagtatcatcttccagaaggaagaatcttagttgaagaagcaaggaactgttgcctccaactcgtcagcttcaaagtcagtcgatggtgagtggtctgggaaatggctaaacttcgagagaggaaaaattatgcgaactactgcccatgattcgcctcatcgaacattctgtgtgtaagacggcatgacaaaaatagacgggcacatacctatacaggaagtacgtccatgtcggcctggagcgcgacgatgggcctggccgcggcgccagcgatggtggccacaacgccgatccgagcaacgagccacctgtacgggatgcctatcgcgtcgagctcggcccgcacgggctcgctggtccggagctcctggcaggccaactcgggtcgctggtggatgcgccgccgcatgccgtgaagcccaacacatgccgcgaaagttcggagcacatagctggcgaaggcacgggaggagctcgtcctccactctggcaggcgggtggcctaggtggaggtgcagagctctgctcggcctcgacggcgtctcgatctgggcggccctgccttgctcggcctcgtcagaaaagggaggaggcacggtggggcccgacaaccggttgccacgaaggttgaggcggagcaacggcaaggaggactgcggcgagaagcgactcggcgagaagcgactgggcgacctcatcatcgtcggctatggcgtcggcgccgccagggggggcgaagatgtcgttggcgtccccaacttcctcccacatcgagctcatgttgtccctcagcgctatcatggatccggggaatagaaggctttgggggaagggatccaccgcggctgagcgagagacattggggatgggatcttgggagaaaaggaagcgagagagagggcggggggcagtgatccggaaagagggcgagagagacgaagcgcagtggcgaggaaaccgcggtcgaggatggaaaggagcgccgtagaaggaagccgcgactgcttgatttgaggaccgtgactgcttgattcgaggatggaaaggagcgccgcgggcgggtgggatgcgaggaaaccgcggtcgagcggcggtggtgaggaggatggtggcagaaccgtgcaccactggttgtggacgtctacactacatacttatatagtagtagagatttagagtaccatcaagacattgatattcttctaacacttgttggacaaccagctgagaatcaccaaataccttcacacgttttactcccatatcatttaaaagttctaaaccgaataggagggcctcatattcagcttgattattagtgcaataagttttcaatcggctagagaagtcaaaggagacattacttggtgaaacaagcacaatgccaattccttgtccttcattgcaaaccgatccatcaaaatataaagtccaaggagtaatagtgaggtatgacatgtctagttcatgaatatcattaacccgatgttctacaataaaatccgctacgacttggcctttcatagatttcaatggttcataggccaagtcatattctatgagtgcataagcccacttaccaattctaccactcataattgggttatgcaacatgtatttgattacatcagcttgaccagaaacagtgcaatgactagacagtaaataacatctacatttggtgcatgcataaaacaagcataagcataacttttcaataaaagtgtaccttgtttcagcatccaccaaccttcggcttagatatgtcaccacatgctccttcccctcagtttcttgtgtcagaacagccccaataaccttgtcttcagctgcaatgtataatctgaatggtgctcctacttgtggtgcttttaacacgggagccgaagacaagtattttttaatgagatcaaatgcttcctgctgctctgccccccaagtgaattcagcatcattcttaagccgaaggataggggtgaaggcatcaatcttcccggctaggttagaaataaaccttcgtaaataattcaccttgccgagaaacctctgcacttcgaccttacaagtcggaggccccacattccgaatagacttgattcggtcagggtctatttctataccatgttcatagatgacaaatcctaaaaacttaccagccgacactccaaaagcacatttacgtgggttcatttttaaaccataccgacgcattttatcaaaggctttgcgcaaatcagctatatgagaactaaacttagccgatttgactacaatatcatcaatgtagacttccacagtgtttcctaacaactcatggaagatcagattcatagccctctgataagtagcaccagcatttttaagaccgaatgtcatgacaacccattcaaataaaccaataaagcctggacatataaaggccgttttagacgcatcttcttcggccatgaaaatctgattatatccggcattaccatcaaggaagctaataattctatttcctgatgcattattgattaatgtgtcggctatgggcatgggatattcatctttagggattgctttatttaaattacgaaaatcaatgcatactctaagtttacctgactctttcttctccaccggcacaatattggagacccactctgcgtatctgcaaggtctaataaaattagcttctagcagccggtggatttcgtccttgattcgtgggagaagatctggacgaaatgttctagctttctgcttgaaaggtctgaaaccagacttaatgggcagccgatgttcgacaatctctcggcttagtccagacatttcagtgtaattccaagcaaaacaatctgaatattccttcaatagaccgatcatctcatttctagaatcggtctccagggtcttgtttacaaaagtcggccttagagttttaccatttcctatgtcaatctcctccaaaggatcagccgatgtaaacccctgtcctagtttatcaagatctctgaattcctctatcatgtcccccacagaggaatcagatgatctttgtgtgatggcggactttccggtctcggggaccggatcatccgtaatactatcttttcgctgtggtagatgttctgtcttaaagtccgaactgttctgtgaaagaccagaccatccggttttgagggccgaattgtccgtgatcaaagactcatgaactttgtgtgtattcatcatttaaactctatttaggatttagccgattctccatcggctctagcattacaggaatgaaacctttcttatctatacttatgaactgataatcagaaaaatctacccctgtgagacatgtagcagtctcataagtccagagtacaggggaatcggccacagcgatgcaggccgatacatctgcatgtacttgttctacctcatcgcctacccattgtattagcatttgatgtaatgtagaaggtatacattgattggcatgaatccaatctctgcctagaattaaactgtaattcccttctacatcagcgacgaagaatgcagcagcaagggtcttagtcccgatggttaattcaacggacgtgactcccctggctttaatcgaactatccccaacaccgctgagggtcatgttggttttgacaagttcgtcatcttgtttacctaattttctgtataatgaataaggcattagatttacagtcgcccctccatccaccaacatcttagcaatcggtattccatcaatgtgaccgcgcacgaagagcggctttaaatgatttaccgattcctttggtttagtaaaggcggcttctttaggaccaaaatcaaactgggcagcaacaggttcatcgtcgccaatgatagtacaatcggaagaaagtgtaataatatttacatccatacctgggcgttctggagaagcctcgtagtcgaccaggtcttctcctagcaggtcgtcctcttccattaatgttgttgtgttgttggaggcttcctcatgaacggcggacggtccgcacgcgggggccggacggtccgcgcctggtgcaggttgtccagagccttcctggtgaacggcggaaggtccgcacgcgggggccggacggtccgcgccctggtgcaggttgactttctatttctatggccgtttgttttttctcaacggccttcggtctccatttcttttgcggtggcgggtatagtggatgtgtgtcattaaatgtcttttccgcctccttctcctggctctcctttgctcttaggcgctgtaattttctcttttgggatcgtgtcaatcccgctgggcaccatcgaggcatggagtattttggatcggctgttttaatggtagccgtatccttttcggttgtgttggccgattcgccgaaaatcatcggtcctttattgtctccctgtatgacaacatctgcagtgcctattttgatgatgtccttttttgttgttctttgagttgctacaggcatatgccccctgccggattggtcggcctaggaggccgagtagttcggcaaccttgttgggcctgtgcctggtgaccggattcagcagtgctcaatcggtcttgcactggcggtgccaacctatcaaaaacggatgtttggggtgccccccaggcggggtactgtggcatcccaaatggatatggtggcatgccccacatttgattcgggacatatggtggaggtaagtatgtgtatggatatgacatagatggataatgaggtggaggggtccatgtcggcatgttaggtctcaattgtacaataggacctttcatttcttccgattggtgacgtggcccaatcagcctgacctgacgttgctcatgaatgggtgagcgggtcgcttcggtagccgatcactggggccagccttctttttcacatatttagacaacaattgatcgaaagtcgggccaggcttgatcagccgaccagctgctttaaatgtatttgttttccacgtacctatctctggtcgtcgtggtttgaaggtacgtggtcgttgcgagtcctgagcatggccggaccgtccgccggagctctccggaccgtccggtggggtcccggaccgtccgcgcctacgtgccggaccgtccgggatacgcagcacgggttcctgtatctgtctccctgtctgcgcttgccccccagtactggaggttgtgatggtcacctttagggtctcccctccatcgggagtcttctcggctgccactttcctgcaataaactttatgatcctcatcggcccttttggaattgccgatgattgcctctttgcctttgcctttatcggccgtgtttggccgaaccaggactttcttgccctcaaagtcaatcacgttcattggaaatggctctgtatccacctgcatttcctgaaatttcaatcgtccctcattaatggccgattgaatctgtcgttggaatacattacaatcattagtggcatgagaaaatgagttatgccacttacagtatgcacgacgttttagctcgtcggcggatggaacagtgtgatttattttaatattgccatttttgagtaattcgtcaaatattttatcgcacttaccaacattaaacgtaaacttaacctcctcttgtcgtttcttttgaaccggctacaaggaggaacaagctgaagatttggcctgttttggccaaaccatttcagcagcatatacttctgctgattcgtcgtctgagctactttggtcgcattctactatatgtacgttgtgacgcattgttttagtagtttctttgctccggctttcgcaagccaaagccctctggtgtaactgtgctagtgtaaaaaattggatgccttctaatctctcttttaaataataccgtagaccattaaaggctaatcctactagctgtttttctgctaaatgaatttgaaagcatcggtttcttgtatcgcggaatctccggatgtaatcattaaccgattcgtcttttgtctgtcgcaatgacactaaatctaccaaatccaattcataatcaccggagaaaaaatgatcatgaaatttttgttctagatccccccatgatgaaatggaattgggaggtaaagtggcataccatgcaaacgcggttcctgttagcgataatgaaaataaacgcacgcgaaatgcctctgtgtctgccaattctcctaattatgctaagaactggcctatatgttcgcgcgtgtttttcccttgatcacccgaaaatttcgcgaattcaggtattctagttccctgtgggtacgggtggtgatcaaatcggctgtcataaggtttccgatatgattgccccccagggaccatgcttactccgagcttatctcggaacgccccggctatttcttccctcattatatcaatggcagccggtgcaagaccaccggctctctggtcaaacataggtggggttggttgcatattagtatgttgtcgttccccccattggtttgagctaagtggtgcatttccatttgctctatatggctcataggtttgatcgtttctttccagccttttaggtggggccggaaagctttcctgggctctggatcctgaattaatgggctggtgcattgcataatgtgatgggaagtgttgctgggacgggcgaggattcaggtaataatcctcctcaaaagactcatgcgcggactgtccggatatgtacccggaccgtccgtggtcatatgcggaccgtccgtcattgtatgcggaccgtccgactgggtagtttgggttctgtgtcatatgtggtggctcgggcgcatatctaggtaactcatttaaaataggcccgactgctgttggcctggacggtccgcgctcacgtgcggacggtccgggcatgtgcagatcggctggtttgctgccgatttgcggttgcttagggtatgtgtccatcggcatcccataaaggggttgtgactggtcgtgacaacctgtagccgatgtgttacgcgtgttatctcctaactcaacctcgtgcgaaggaaaatttgcggtactagatttatcaaatgcacgtactagtctcttaagatcgctttgcataccccctatgatgttctgcatttgttcacgctgatcttctacataatttctaagagattgcagatcgttggtattacttacattggggatatctggcgtgggttggagcgaagccggatccgtcgcccgatgtcggacgaccttgttgttcctgtccactttgaagttggccaagaactttgctttcgcctcctggatcatccgctccttgtgctcctcaaactggagctgctcgtcagccggcaaggtttcccaagtcggctctatgatgttgcttagagaaatatcagagctatcctttgaaccggccattgagggtcgatttgatgagcctagatgttttttccccagcggagtcgccaaaaagtatgttgacgccttttcggagcgccaaacactcaacaagaaccgtggcggtgccctctgcacaggggcggacggtccgcgcgcggggccggacggtccgcggcctggtgcgaggcgcggtggtactctctgcgcaggggcggacggtccgcggcacagggccggacggtccacgacctggtgcaggagctcgggttccctgcctgacggccggacggtccgcgcgtacgcagggacggcgggagatcgccgacggcgcctggatctcgctcctgggagggaccccgtcggggagtagagatcctaggttgtgtctaggctcgggctggccgacctaaactcctctaatcgacgtagagtcgaggagagacgaagaatttggggattggatagctaaacctaaactagactagaactactcctaagataaaatgtgaaatagaagttgtattgattcgattgatgattacaaatcggccgtatacctctctatttatagaggaggggggctgtaccctttacaaactaattccagagcttatcccgcgattttagctaacaaccgtagcacaaaactcggaaccctaatctgctctgcgcacgcgcggaccgtccggcccacaggcgcggaccgtccggcctcagggccggacagtccgccggctcatttctggttcgaacaccatgattcttgatccaaaatccgatccaacataaaaaaccgacctaaagccaaaaaagcttgacccaacatgtccagcagggatgcacgagccaactcgactcgatactaggtacaggtcagacacagaccatgccaaacaacacatcacccgattttgaccacccgacatttaaatagatctagattcaagtccctggttcatatcaagtatgcagaggaaatacggcgacacgacgagtgtgttgaagcatggcttcactagatgacacatgatttagggcttatttagttcgcggatgactgtgccacactttaactaatattagtcgtcggaattgaaaaactattactcatcggaattgaaatactaactttataaaaaaactaatcaaagtgtgacaagttagacatcaaataaacctttagttcattttattagagtaggggttaatatggaaactccaacttttggagaagacaaattatcgttagtgtgtgcgaccgtggccaaacgatacggcaggcgctgccgcgccggtccagtaaatataaatcgtgttcctttttcttttgtttaaaatgtgggagagaaaaaaaagaaaatatgtaccagtagagatatcaggcccatcaatccattaaataatgactcaccaaacctttattctagcccaccaacaccgacgaaaggcccatttattccagcaccacgctcaaatcgatctggccatccatcccagcgacaagacgccatccatccgtccaccgggtagggtttctccagaattaaaagggccgaaggaggcgcccttaaaaacccttccattcacccgcagctcccatcctctcgctcgccaggagaagcagccgccgttgctgctgccgcgtccacaga

SEQ ID NO: 326 - DNA, 249 bp, Zea mays
  source 1..249: mol_type = unassigned DNA
ctgagcgtcggggaattgagaattggggaatcgaccagaaaggagacgagagtgtcacacgtacatgggccaggagagtggtgggcctacaatacattctaggaggtccatcgaccaccccaaaaaggcccagaaggcctgaaaagcaaaaccgtagaagatcactacttcactagctagggttttcatccgtgacgaagtggtctatataaaaggtcagaaccgaaaccttaaccttattcggcgact

SEQ ID NO: 327 - DNA, 2616 bp, Zea mays
  source 1..2616: mol_type = unassigned DNA
agatggggtacaatatttagactcacaaccctaaccctaatgggtcggcaacccaacagtggtgccccccacacaatataacatccacccgtagacgcaacaggggcaccacacatgatgagactatagtagaggccaaaggtaggagccgacaagttgaaatccctccatagtcgcagcatcgtgagggtgcgaatgttgcggcaggagaagagaccagtatggattccgagaaggctatagcccctagatgccgagttagccgaagtcgaggtggccgtggtcgggagacacgcattaggagcctgttctttggaagggttcgacgttcgagcatcaatgatcggcagggcgacacaacaaaagagcaccggcaggccgacctttctgcttcttcgttcgtccggacgttaaggagacccgccagggaggtcgacggcagctcatgcgtctgcatcgatcatggtgtccgcgcccgcggcagaatagaaggggaacgacggatccgaccagggaggccactggagcgatggatccggccgagaagacgcgatccggccaaagggacgacagatcgagccgagaaggtcacaacaacgtggatccgggcgggaaggccgcgacagcgacggatccaacgaagacgatgaaggggagggtgacggggcggttccagctggacatgggcctactccggacctagcaagggttgtcgacgctagcgacggaaaatgctcatgaggttggcgcaactgggtggcggcggccagccctggacgcggcggctgcgtggatccgggcggcgctgtagagccttaggagggaggggtgagcagcgcagggccctactcggccatggacgaggagtcaacaacatagaaggagagagagagccactgtcgtgggcgcctgctgcggtggtggcgaggccacccacaccacaggttgtcgcggcaaggtcgcccacgcccgctgcagcggcagtagggcaaagaagcgtgccccgcgacgaatctgggcccacgagcagcgccgtggttggatctaggcaggcgagcagaggttgccggcagggaggggtcgtcgcgccaccaggttggaggtgaggggtggccgcactgttgggagggggtggcgcgcccatcgacacgagcggctgtagctgcgatcgtgaccgagagggggggtggggtgggcgcgcggctgagggcagccgcagccgcaagcaggcgagcccgcccaccgccaccactccacttgagagcgagcaagcctaaggagggcggtcgtcggggcaacgccgagccgcgggcgcacgcacatcgaggagagcgcgacacgggctcacgagcgcgtggacgcggacgcgcgcagggtaggcagccgacggcgcgggcgtgcaccgcgaggcacgagcgcgcgtgtggacggcgggtggcaccgcaagggtctccggcgcggattcagcgggtgggagagtaggggcacagggcttggcggccagggaaggcttggcctacggaggggaagggaagctgccccctgcccccaggagggagggttgagtctcccgggggtagcagctaggaagacagtggctggctatgggggtgggtggcgcctgttgtgggttggggaaaccctaatcctaaatctagtatgataccatgtagaatgtagaagtataaagtgtttgatatattgatatgagaggtttgctacgacaaacaatctattagggtctccaagttgcagttgatcagtgtgaggcttgctacgacattcctccttttttttatcagctgaagcagtacacaggaacagtgtttcttctcctactcaaccagcggcagcagctgcggctacagcctacgagcgtttttgttgggcaccggtgccgctggttgctaaggtatatagagctagaatggcatgacagggctatgttgctgctcctttcagattcaccatgtatttttgggctgtcatctatgcaaatgtgttagtttgagtgtagcgaatcttacaacaaaactttcttgactccacccttttacctctaaatgttgcttgacttgaaggtggactgtagcctgtagggtagtcctgtactagtcacgagctctaccgttcagccctcatttttgctgccagggtgaacaataaattccaagacgaaaaaaaacatcatctagcagagtgtaaagagtaaagacgaatccaaggtaccagcatagatactattggaattccaaattttggagaacaaaactcgtcagagtggccaaacaatacagcggatgctgctccagtacaaaaaaaaaaaacaggcccatcaattcatgaactcatcactcaccgaacatctctaccattctagcccaccaacaccgacgggaggcccatttgtcccagcagcacgctcgaaccgatcctggccatccatcccagcgacaagacgctatcggcccgtccaccggctagggtttccccagagttaaaaggcccggaggaggcgcccctataaacccttcccttctgtcgctgctcccacctctagcccgacaggtgaagccgccgccgctgcagtgtccatagccaccgcaggagactgag

SEQ ID NO: 328 - DNA, 9481 bp, Zea mays
  source 1..9481: mol_type = unassigned DNA
atttttgaagaatcagcttgattcgttcatagaatcatttatgaaaggtttgaccctatttcacaccaattgatcgtcacttcttctaaagatagtaacactacatctgtaaaaagatagttgtagcccattttgcataattaagaaatggaaagcaaattgtaatctaaagaatctacaagaaaaacattggaaatagaatggtcaggtgatatagcaattttacccaagcctttgaccaaatcttgatttccatccccgaatgtgatagctcgttggggatcttcgtttttctcataggaggagaacatccttttcccccctgtcatgtggtttgtgcactcgctatcgattatccaacttgaaccaccggatgcataaacctacaaaacaattttaggccttattgttaggtacccaaacagtcttgggtcctttgacgttagaaacaagcaccttgtgtacccaaacacaagtctttgaactcttgtgtttgcccccaacatatttggcaactactttgcctgatttgttagtaagcacataagattcatcaaaagtcttaaaagaaacattagctcatttgatgcagtaggaattttctttctaggcaatttaacatgtgtggtatgcctagagctagatgcctcattcttatacataaaagcatggtgagaaacataatgagatttcctagcatgaatcttcctaattttgtgctcaggataattatcaggatataaaatatagccttcattatcctgaaccataggtaccttgcccttcacaaagttagatattttttaggggcattaagcttgacattgctcccctgttggaaaccaattccatccttgatgccaaggcgtctcccattatagagcatgcttctagcaaatttaaacttttcattttcaatttcatgctcattaattttagcagttaattgagttatatgatcatttgttgtttaattagagcaaggtgatcattaatagcttcaacattaatatctctacatctagtgcaaatggaaacatgattaacaaaagatgtagagggtttgcaaacatttaattcttctatcttagcatgtaatatgtcattctcatttctaagacaggaaatagaatcattgcaaacattcaattttttaatcttagaaattaagctagcatttttagttttaagactagagattgagtcatggcaatcatttaattcatcaatcttagcatttagactagcatttttatttctaagattgataattgaatcatggcaaatgctaagctccttagtcaagttttcacatttttctacttcctgagcataagcattctttaacttaacatgttttttgttttctttaataaggaagtcctcttggatttccaagagatcatccttctcattaatagcttctattaattcatttaattttttcttttgttccatgctaaggttggcaaaaagaataagtaaatcatcttcgtcttcactaaagctaccctcatcactagatgttgtatatttggggatggccctagagtgtaccttctttctcttgccgtccttagccatgaaacatttgtggccgacgttagggaagaggaggcccttgttgacggtgatgttggcggtgtcctcgtcggaggaggagtcggtggagctctcgtcggagtcccattcccgacatacgtgggcatcgccgcctttcttcttgtagtacttcttctttcccttcttgtcatcatccctgtcactttcactagacattggacatttagcgatgaaatgaccgggcttaccacatttgtagcacacccttttggcgcggggtttgtagtccttccccctatgcttgaggatttgatggaagatcttgatgatgagcgccatctcctcgttgtcgagtttggaggcgtcgattggaagcctacttggtgtagactccctcttttcttcttccgtcaccttgaatgcgacgggttgcacctcgagtgtggaggtggcaccttgctccaagttgacgatgtgtttggagtctttgatcataagttcaaagctcacaaatttaccaataacctcctcgggagacattagtttatatctaggatccccacgtattaattgaacttgagtaggattacaaaatacgagggatctaagaataaccttgaccatttcatggtcatcccatttggtgctcctgaggttgcgcacttggttgaccatcgtcttgagccggttgtacatggcttgcgactcttctcctttgttgaggacaaatcgaccgagcttcccctcgaccgtcttccgcttggtgatcttggtcacctcgtccccttcgtgcgcggtcttgagcacgtcccaaatttctttggcgctctttaacccttgtaccttgtgaaagggaaatgtgcccttgggccatttctaagtattttggtgattgagtgccaacacaagtgcttttgtgctaatctatgcaaaatggtggacaaagtgcaaatcatatcaaaaggtatgtttctagacttagtacattgttttatggactaatgtattgtgtctaagtgctggaaataggaaagattgaattggaaatgagatggctttgttcagccaaagtctgctcagtctgggtgcaccggactgtccggtggtgcatcggacagtgtccggtgcgccaggctggctctggcgaacaggctgctctcgggacttcgacggcggtgtacggctataattcaccggactgtccggtggtgcaccggactgtccggtgagccgttcacaggcaaactcgtcgctctcgggagatgattaacggcgtacggctaaaattcaccggtctgtccggtggtgcaccggactgtccggtgagtcaacagtcagccggggcaacggtcggccgaggatttcgcgcgtgacgcgtggccgagccaacggtcacattggtgcaccggactgtccggtgcgccaacggctctcagactccaacggtcggtttcgccaaatgaggaaggatatctgcaccggacagtgtccggtggtgcaccggactgtccggtgcgccagtcgacagaaggcaagatctgccttccaggattgctctcaacggctcctagctgccttggggctataaaagggacccctaggcgcatggaggagtacaccaagcattccttgagcactcttgatcactcatactccattcttgcgcacttgttcgacattctagtgatttgagctccattctagtgtgctagtcttttgagcttaagtctgggtcttgagtgtgtgtaattgctgtgatcttagtgtcttgtgtgagttgctaatccctcccttactccgtgcttctttgtgaatttcaagtgtaagggcgagaggctccaagttgtggagattcctcgcgaacgggattaagaaaagcaaagcaaaacaccatggtattcaagtgggtctttggaccgcttgagaggggtggattgcaaccctcgtccgttgggacgccacaacgtggagtaggcaagcgttggtcttggccgaaccacgggataacactgtgccatctctatgattgatctcttgtggttattgtgttttgttgagactcctctctagccacttggcgattattgtgctaacgcttaaccaagttttttttgtggcttaagtttcaagttttacaggatcacctattcacccccctctaggtgctctcaccttgttatactactctcgacacaaggaggcgaggagtatagacgtggcttgggagttaaagtgctgaatttgggtgacctcatctaaatcgtagtccttgtccccctccttaggtacctacgctccatactcaacaatatctcaaatgcttgcgtggagtgaggttagatgatgcctcatttgatcactccacatgcaataatcttcaccatcaaaatatggtggtttgcctaagggaacggaaagtagaggagcgtgcttagaaatgcgggcataccgaaggggcatcttactatacttcttgcgctcatggcgctaagaagtagtggacggcgagtcggagccggatgtggagggtgacgatgagtcggtctcgtagtagatcactttctttattttcttcttcttgtcacccttcctacgcatcatggtggaggaagaggattcctccttatgcttgtggctggactcccttgagagggttctccttgagcttgcgggcatgtcgccggtcacgatctccctcttggtgtgttctcccgacatcacttcgagttgttagactctaatgaagcaccgggctccgataccaattgaaagtcgcctaaaggggggtgaataggcgtaatctaaaatttacaactttaaatacacactacaagtcagggttagcattagaacttatatcaagtccgggagagagggggaaaacaaataaaatggaaatcaagcgaatgaacacgatgatttgttttaccgaggttcggttctaaagaacctagtccctgttgaggtggtcacaaagaccgggtctctttcaaccctttccctctctcaaacggtcacttagactgagtgagccttctccttaatcaatcgggtcacctggaccccgcaaggaccaccacacacttaggtgtctcttgctttgattacaagtcgctttggaacaagaatgaggaaggaagaaagcgatccaagcaacaagagcgcaaatgaacacgaacacacacactctcaagtcactaggtggttggaatgaattttggacttagagaggctttgatctttagaaaagtgtcttggagtgaatgcactagctcttgtattgaatgagaatttcagaaaacttggatgcttggagttgtggtggttggggggtatttatagccctcaaccaccaagaagccgttggggaaggctgctggcgatgggcacaccggacagtccggtgcgccaccggacaggttctgttcactgtccggtgcgccgccacgtcacccaatcgttagggttcggggctcggtcgaccgttggagctttgtcttcttgcggcaccggacagtccggtgctcctctgacttatgtgttgcactgtagctacactgttcacctttgtagagtcgaccgttgcgtgagttagccgttgctccactggcacaccagacagtccgatggcacaccggatagtccggtgaattatagcggagcgcgcctgctgaaacccgagagtggttggttcaaccctgtacggacagtccggtgcgccagaccagagcacacttggtttcttttgctccttcaaattggatccctaacttgaatatttattggtttgtattgaacctttatgcacctgtagaacatgtattctagagcaaactagttagtccatatatttgtgttggacattcaaccaccaaaattaattgtgggaaaaggttaatcctatttccctttcaccttcccttttatagtccaagggaggcacattacaagggagctaaagcccctactggtggtcctaagagtatttacaacatggaacattaaatgccagattgggctaacaacgctagatcttcctgagcgtgtatcccttcttggtcgtcgcgctggctcttgacatctcatcctcctgtttagtctaatcggattacatgtgtatctcttgttgtaggttgcggcatagtctgatacactatcatgcgtaggtgtgggcggtgtcgtctcgtctcctccactcgtatcttcatgcatcggtaacacacgaagaacagtataagtcataatgaagggcacccaaacgacgcattgggtcaatgctcttgcctcggtaacgtgcgagtaatagtaaatgccgcacgttgcagacttggtgcatcgcgcgcatttaatgcaggggatacactacctgccattgatgtgggtaagtatgggtcccatctacatccactgttggtgtgccctatgtcagaggctcatgttaggtacgtctagccacgcgttggcaccaaacctctacctggacaaggggtaggcccgggaataagtgatgacacggtattcccaggctctccatgatcgtgggcccaaaccacacccgagggttccaagtctcggtcgtactaatcaagacacgtggtgacatcagacctcacctggcctaaggtccggatggtattttctaggctcggagctactctgaaggcttggtgctgtagccagagaatgtcttcttctcaagggtcatgaggtccctccagacccctttctccagggattcgatgggcccacgaggaggtccgagttccatttgtaggatcctagatctatagttgaagttgtcaattcctccctttatagggcttttatggagatggtgatctagcccaggagatgagcttaccccgtccatgactccatatggtgggccttagctagccatccgtaaaaccctcaatggtagccattggggtcttactttgacatagctggagtgggtaccccatatttagggtatcgatagaggcccccagacccactttgggtgaggcggcgaacccgcaggtggggccatacccgcgtcttattctagaaatgccagtctcgtgcagcagcgctgtgcctgtagcttcatgttgagtaagttgcctatcagcatactgctgttgttgcataaggcaaacaaaatgacttaccctcgtgtttatcaagcttggtgagtcaagagtttctctttctcgccccctgtcactaaggctcactggaggttgtcccagacgtgggggttacctctaggccagggagctaccccccaagaatggttcaagaatagtgatgagcagcgtaagctaccccttagatttgttcaggagtagtgcttagcagcgtaagtgtcgtggtttcataaatcggggcacaatagatttgtgttcgatgggggatgctagcgtggactcacttcgaatgttgaaccaccaggggttcaatgagaaatctaagatgaggtttatactgattcggattcgcaccctactccagtgtagtgttaatcgtagtattgctttgagcatgttataataggtgtgctcgagtgtcgagaagaaagagggcctgcccttttgtagctaaagggttggaccttacataggagatctattttctacaagagagagatcagctcctctgggttatcgttgtgggtcctctgtaggatcgtgcgtagttgtactcctagtatggcatacctatcggtgtttagtgttcgacgcgtgtctagaatggacctgaatttttcactcaattcaacagaactttacaagtgttgtgttcgtgttttctcccaaccttggttagccagaagctgaggatggcacgcgccgcaccacccgtcgtccgacgccctccgaggcgcatccgtcgaccgcctatcgcccttcgacattggccgcttcgcggctcccccgttcgccacctcagctccgcccaatgcttgccagctcagtggtttttccttgtcggttgccatagagccacaaccaagagaaccatcgagccaggtcgcggcgcctgctacctgcgggctacgatggtgttcaccccactattgccgccatttctctcttccgtagtttcgtgaaaatcacacccgcaatactggccatgtgcccatctattattagcaagaggctcgtatttcttacctcacatatgttttctaatcatatatcattttatttgattttggtggagactatttctttatgaaaattcgtatgtgttaaccttcagtgttgctaaaaatagtagttcgtgatcgctttttgctaaaaaatatcgatcgtgtgtccattaatcatggacaagaggctactatgggcatgtttgttcagcttttttctgaccagcttttctgataatttggatgtggggagaatctggctgtgtggagaatctgagtaacattaggattacctgcggaggaagataaatgtgtccatagggctcaggatctagaaagtgacggattcataatattgcaacgactcaacagattatgtgtttatattgattttgaatggtttttactcaaacaaattttatagaatctggatgaaaagctgagtatttggcagtccgcggcattttttggtggccaaaagctgcaaaaatctgaaacaaacggggtatgtctttgcgaaaaatctatgtgcgggtgcccaagagcagtggcccacgtaaggcccaagcccaccacgttttctcgacgccacccgcgcactcctattagggttcggcatctctccccgtctatatataccttctgccgccgccatcctgaccctgttccccacccatatcgtgaacccgccgccgacgcagcagcaggagacgcgccaaggagagcccgcaaggaggcgactatgagggccaaggtacatcctccatccccctaactcctacgcgcgtgctatctcgtcacgtagattcctgtggcgtagcaactccttgacactccctgcctcgagtagctgtctgctcggttcgtccatgtcccgaagctgcgattgcaaagagagcgattcgtccatgtaggggcgctgcgattacaaagagagttgttcgtccatgtaccggggctgtgattacaaagagagaggctcgagtggcgcaattcttctgggacggcggatctcgccgtgcgtgcgtggcgcccctcgtcgcagcggacgggtctgtatctttggcatgggaggctgatctatgagctgagccgaacagtgactgatcgtttcgtgtgagcttggtatctcttgtcccgtggcctggctccgcatggtcatgccgctgcggtcggtggaggtgtcgcgcttgtggcgccgccgcctgctagcaggttcttccccggccacggtggaggttccttcgcatacatttgatatgagccccattctagttaggatatattattatgaaatctagttactagttaggatatagaactattgttctagcagcatctgatggtggctgaagagatgttgccagtgctttatttgttgagatttagatacttcgtgacttgattgatgatttgtttgcactggaatctggcacttgaaatatgtaatttactgtttacctaacttgtagatacctagcttttctacaatgatagatgtacactatgtataggtacatatgtatctagaaagtacaataacagtcctgttctgcgttttacttgcttgcattcttgcctcttttgtgctatatatttttcttgttatctaattctattcattttcatctgtcaatcttcagtggaagaagaagcgcatgaggaggctgaagaggaagcgccgaaagatgaggcagagatccaagtaggctgatggggattgtggatggtggtgtcggcatagttgtgttacgtttcttcgatgcgtgagttcatggagag

SEQ ID NO: 329 - DNA, 3280 bp, Zea mays
  source 1..3280: mol_type = unassigned DNA
aaatttcatttgagtttcatcttcattaaatatctcaccatataaacaaggatgatgatataataacaaaaatttaataaggacatagatagagagagtttcatcaaaatgagatatttattttcatttacatgaacctcatcatacacgaagataatgtgacattttcagtaacagagcaatgaaactatacactgaaaatagcctaactatttatctaggctccgtgtgcagttcaaccttatttggttacctcggttgaagtgttctagtgtactagagctaatagttattggctaaaattagttgtagacatctaagctatttttagtaaattagttaatagtcagctagctatttgttagttacgtaattccattagcaattttttagtcaatcaattattaactctaatgcattcaaacaccctcttaagcagttggtggtatcccataattcttgtcaaatcttgcgtatccgactatgcagcctcccttcttcatccgccatgcagtccattcttcctgcactcgctatgcagcctaagataaagtagaaacccattttacattgccttacgcccttacccaagctataggtatgatatataaccacgatgcaatgcaataccaatacaatcaactactgagacctgtaatattgtttttgttagacagaaaaatcgtagtttcaataatgtttccaaacattttatcgatgggctctagcctgtttgtttcggtggctactttgctatagtttgtttaactttttctatctaatattagttctttaatagtaaagaaatcttaggcaagttgtaacacaattagtcgagaatcaagcatgcctctaatcctctagtgttatttttttgacaaattgtatacccgctatttttgataaaattatatatccactaacaaattgcttatttccttgcctcctaggatggtaatggatcaccatccaaatatttcttcacgataagttaggaaccttaattaattttagttcaaaaatgaatatgaataagatcctaatctgattcgattcttaaattttatagtgtaaaatgtagagcccattacaacacctactcctagcaaaatatgcacatcttgtcataaattttgctctactctttgtattgttgtatgtaatgaataatctttatatatatatatatatatatatatatatatatatatatatatatatatatatatatgtgtgtgtgtgggggggtgtgggggtgtgtgtattgatgtctcttggacaacaagattacacaaaacacaattagaataaaaaaatatcctcgtgtatataaacttgtccgtataccatattagaacacataaattttaggcaacattttttccatcaacattcttcaatcatcaaccaaaatttacggatacacaagataagagggggtatgtaaggttgtacgtaatgggctacatgataacatcaaagattatgcaagcaaatctcaatccaccaggcgatcataaacatcatagttcacatgcttcagttttaaagccatcgtagttcccgtgcaaagacaaaaacattagaattattcaatacaagttgcacaagatagttcaataaaatttaaaccacaatagtattatccaacaaagctagttcataccattatagtttctagtaaacaagaatagagaacatatattaagcaaacagaccacataggataaggctaaggatgtatttttgtctattgttttctgtgacatcgatctcgtttgcacgagtaaaactaaaacatgagaaaattccgataaaaaataggaatctagaaatacgaacggaaaacactaaaccatttttattcctgtttctaaaatatatcatctcgtttctgtttttctctgtaaatatgaaaacgatcagatcatagttaaaacggaatacagtaccggacgaaacaatatttctctctcgtttcccccttatagcatctccaaaagctccccagaagtctcccctaaatctatttttttggaaaaacacaaaaacatgtctccaacagttcctctaaagcgcccccaactttttcatagcccttaaaactccctcatttgtagctacaaatgaggggttttttgggctccccagaaacaaactgctgctttaagatgtttggttgaggagccaagtagaatggagtcgtttcatccctgattctaggaacggagccgttctgttctgtgtttggtaatctggaacggagcggctctgttttttgtttggttgcagagtgaacggaacggagcgtgactgtgagagcgggatgagaacggagcggctccgttcggttgattttttggagcggaatggttccggatttgaggagaatattccataattggagtcattccgttctagttcctttataaccaaacagcaacaaaactgggatagaatggttccgttctacttggctcttcaaccaaacactaactaagggacctgttggagaaatgattaaaatttaccctcacttattatttagatattccttaaaactaattttgagaagtcgttttatggagagctcttggagatgctcttagttcgtagatctgattgtgtgtatgtatgtaagcatatgcgtctgtactacgatccacggtaaaaaagtcacaaacatataataatagcgtcattcaataaattgataacgtaaagtataaatgaacttttaactctgtttgagtaaacaactcgtgcagagactgcaatgaaatctattattttttctaaaataattatacaagttgaggaaatgctatttgttccactaagcgacgatgtattttgttttttaaaaaaatcgacgaggtactgctcggttattattttcacatgcaccgcgcgttgtttttgggccggcccatttgtattgcgaatttgcggagacgaatatgaccgaatggagtttagaaagcccagctcacttaggattgtctattttctcaagaaaagagagaatgggcccaaaggcctaaacaccaaaacccgatccgcttatgggatgtcatggacatggagtctgggaccgtccggcagatgagacgacagccgtcggatcagaaaccctagcccgggaggctctccctattaatacccaccctgcaccccgcgggaggagtctttcctagggtttcgtcgcttccagccgccgccgcgtccgcctcgccaagcgcagcagccgccgcagcacatcgctctctcgatctcagcc

SEQ ID NO: 330 - DNA, 10000 bp, Zea mays
  source 1..10000: mol_type = unassigned DNA
ttatcgtgtgtaatcgacaatgatatctccttaaattttaagtacctgtgttgtgtcactcgggttgatgctgtttacctaacaaatccgtttggattttttttgcgtaaaagattggttagtctccgaactagagttcagcacatctttcatctttcggcgaaagatgaaagtgtcatgaaacttaacgttgcccagaagcttggcccaagttaaaatcacattgtccgaaattctaaatgattgatgcacttgaaattcgaagaaatatgctgcacacacagcaagtcgggtctgtaggcagaaccgccaacagtcagcacctgcttaatcaaatataaatagcatcgtctcactttttttcccaactagtgtgtgatctgtgtgtgagtgtgagattggttcaaattcctatttgaattttagcctttttttactatttaaacatgggagcaggctacccattagtaggtggtaccgtggtagtcagcggtcagcacagccttccctaactatctcgtcaatcgtcagctgcactgcaatctgtggtcgcaacgcaacgtcccccgtcgtggccgcgtgctatcttcctcctccctccctccttgccgcacgcgtcaaaccttgcaaagagagttcggtcgacggcgccagccggcgatggcagcgccgcgccaccgccagggccacattgcgcagtgccttggcaggatcctcgcctgccgcggcagcgccaccgccgccgtcgctgccggcccaggcggccgacggctcaccggcgcggagttcgtcgacggcgtgcggagcctggccgctggcctcgccgaccgcggggtgcgccctggccacgtcgtcgccgccgtcgccctcaacaggtacctgcctgcttacctaggcgcatggaattcgttagccgcggaaacgatcgggggctgagccattgctgtacatgaacgcagcgtcgagtacgtgcagctgttcctcgccgtcacctacgccggagccatcatcgcccctctcaactaccgctgggtgcgtgcgtgctcctccacttcatctccttttctcggttcttacagcacacagcactcactccggcaaagagtgcaagtaagtttcgtcgtcgtctccccctgttctgaagcagagcttcgaggaggcggcgcaggcggtggagctcgtgcggccgacggcgttcgccttcgacggcgcgttcagctcctgggcgcttcggctgatggagggcgacaggttcccatccatcggcctctacctcctcctgggcgatccttgcaggaccggccgcgctgctgcaggttgtggtgaggttcttgcttgcgttgcatgcgtgggcattacaagagactctgcacgcacctagcacttgcaatttacacacgcttgctttcgtcttggacacatgttggtttcagctgtacccattaccgacgtcacggggagcctcggcggagctacggcagcggcggcgatggagcccgtgtcggctccagacgacattgctctaatatgcttcacatccggtgaaaaaaccaggctgttacagaacgaatagaattgaaatcgagaaacttggctacaggatgtatagctgatggtacgtactctgattctgatccaaccaggaaccacggggcggcccaagggcgtagcgataagccacacgtccttgatcatccagtccctcgccaagatcgccattgtcggctacggcgaggacgatgtacgtacggtttcaggaccccaacaagcactatcgcatacagtttccatgccatgttagcgactctttacgcagttcaggactcaagagaaccaaaagttgtatgacttccagaatttcgcatccctctctctactcttcggcccctgcaggtttacctgcacacagcgcctctgtgccacatcggaggggtctcgtcgtgcatggcagtcctgatggccggaggctgccacgtcctggcgccgaagttcgacgccaggtcggcgttcgccgccatccaggagcacggagtgacctgcttcatcaccgtccccgcgatcatggctgacctgctgtcctacgctcggtagcgatctccagagcactctgaaaccctacgagcccccgcaggccgcagccgctggtagtggtagtcaagtcacctaaccggagtttctcccgtcttcttcgaccaggaaagaggagatggcgccgggctgcgggaggacgacggtgaccaagattctgaacggcggcggcgggctgccgctccacctcgtaaacgcagcctcgcaatcctttcctcgggctgctattttctcagcttacggtacggccgtacggcgttctctgccagttagctcttcagtgtcatgaggattcattcgtcgtgtgcagacagtaacacgtcgactggatttcagtagctctgtaatctgcaacagggatgaccgaggcctgctcgtctctgacgttcatggccctcaccacgccaaagcttcaagagccggagccggagccggagacccaaccgtgcggccaccacggaggtgtctgcgtcggcaaaccggcgccgcacgttgagatacggatcggcatggatgacgacggcaccaccgccggttcttcgccgaccgggaacgtcttgaccagaggcttgcacaccatggttggctactgggcaaacggcaaggcggactcatccgagtgtgacaggaacggatggcttgacaccggagacactgggtgggtggacgaggagggtaatctgtggctcttgggaaggcacaagggccgcatcaagaccggaggcgaaaatgtttacccggaagaggtactcgttgttccatgaccatttcagagttcagactccacatgtcttcttccatcctctaacaatggcagacatgtgaacatgttggtttcacaactaacgcctggagttgttcaggttgaatcggtgctgtcccagcaccccggagtggcgagagctgtggtggtcggcgtgccggatagccgtctcggggagagagtcgttgcgtgtgtcagcgtcaaggacggctggaactgggtggatgcgagagctgagcacgagcaccgaggcggaggcgaggaggtgtctcctcagatcctccatggccactgcaggacgaaagaactgagcaggtgttctccactctcctcatgtacagatgtactcttctgatgagaaacatgttagcgcgtgtggtgaacgcgcgtctgtttgagcagcagcaaaggtttcttggttcttaccatatccttttctttttattgaacagatttaaggtgccaaggtcttattaccagtggaggcagccatttccggtgaccacgacggggaagatcagaagggaggagctgaagagggaactcctggcagcaattcgactgcccagcaacctgtagctttttgaggcgatgatctgtttttggaccaaatcttggttcagttcgactccgattgaagtcttctgttttttttggtctgtaggtgcttttagcttttacctggttggagtttaagatgcgaaaaaaagagcgtttgattattggaaacctgtaacatccatgacttttcttcaccttgacaaaagaagtcgagtcaatggcaagtcccatgaaattcagagcatccgattcttggagaactgaaaattgttgacgccttttcagagcgccaatcactcaagaagaaccggcggcggtgctctctggtcagccgcggacggtccgcggcctggggctggatggtccgcgacctggtgtgaggcggcggtgctccctggtcagacgcggacggtccgcggcacaggaccggacggtccgcgacctggtgcagcaggagcccgggttccctgcctgacggctggacggtccgcgcgtgcgcaggggcggcagaggatcgctggcggcgcctgaatctcgctcccgggagggaccccgtcggggaggagagatcctaggagttgtctaagctcgggccggccgacctagactcccctaatcgacgtagagtcgaggagaggcagagaatttgaggattggaatactaaactagggctaaactagaactagactagaactactcctaatgcataaggtaaaaacgagtaatagacttgatttgttcgattgttgggggttcaatcggccgtagcccttcatctatataaagggggaggtctggatccgttttcaactgtttcccgagttaatcccgcggttttaggtaacaaatcccgcgagaaactaggaaccctaactgactctgcgcgcgcgcggactgtccgcgtcaccaccgcggacagtccggaccgcggaccgtctggcctcagggccggaccgtccgcattgctctttttagagctcaacatatgccccctgccttttggtgaaggttgacgaaccaaaagcatatgaactaatcctgatgtaggtcaccggcttttcgatatggagattgttcaataaagcaccaatataaaggccgtttcggattgtatctttctcggccatgaccatttgatcaatggatcaaaaggaatagaatggaggtgccccccagtctggatagacgaagggactatacatgtaccatggattcatcatcgtgccattccatgtttgaacaggataatataccgacgatgagtaaataggtggaaagtaccctggtctcatagaatgaataggcgatgcttgttgtgtcgcctttcgggtcgttttgtttgaccgttttgttttagcaggtgaccggggtttctttgttgaccgatcacgtggaacagtctttttgctagtatttttggagagcaactgatcaaaagtaggatcggctttgatcagccgattgtatgtgctttgaccttgcgtctttttccttgctttgtgtagaggttgacgcctttggtcataggtggactgtccggctgagttagccggaccgtttgtctgagcaccggattgtccgcacgtaggtgccggaccatctacgatgctggggctaggctgatgtgtttggtttattaactgtacctgccccccggcgtcttcggaccttttagccttctcgtccgaagcctttcgagcaatctccttttgtgatatatctgacatgcgaggattgctgatgacgatgcccttgcctttgtctttatcggccatttcgggccgaaccaagacctttttgcatgtgagttctattgtattaacaggaaagggttgtgtgtctacttgcatctcctgaaaagccaatcgaccctcatttatggccgattgtatctgtcgacgaaaaacattacaatcattggtagcatgagaaaaggaattatgccacttacaataagcacgcctctttaattcatcaggaggaggaatagtatgagttaatttaatgttgccgtttttcagtaactcgtcaaatattttatcgcatttgacaacattaaaagtaaacttaacttcgtcttgtcgattctttcgaatcgactgtaaagcagaacacgctgaaggtttagcctgtcctggccaaaccagttcggcggtgtatacatccgtggattcatcgtccgaattatcgtatcccactagatgcatcttatggctagccgattttgatgtttccttacttcggctttcacaggtcatagcccgctggtgtaagtgcactagtgaaaataattgggtgccatctaatttttcttttaagtagggtcgcaacccactgaaagctagccctgtcagttgtttttctgcgacatgaatctgaaagcatcggtttctagtgtcccggaatctccggatatagtcattaaccgattcttcaggcccctgtcggactgagctaagtcagccaattctaactcatgttctcctgagaagaagtgttcatgaaacttttgctctaattcttcccaagagttaatagagtttggtggcaaagctgcgtaccatgcaaatgcagtatcagtaagggacaacgagaataaacgaacacggtaggcttccccatcagccaattctcccaagtgtgctatgaattggcttatatgttcgtgtgtgcttttcccactttcaccagaaaacttagagaagtctggtattctagttccctgtgggtatggcacggtgtcgaatcggtgactataaggcttccgatacgattgccctgtacctgacacactaacaccgagtttgtccctgaacatcccggctacctcgtctctgaccctctctgccatgtctggcgaccatccattgagtttgtgggtggagatttcaggttgcctgacattactctgtcggctttcctcccaggtatgtttgaggtgtgtgttaggtgtcctattaatgtcaccagctcctgccctatacccctcaggctctcttgtggtcgaataatattcagccctatgtccatgaggtggtatggcatgattataatgtgttgctggtggggcaccataatgttgctgcgatgaatgtgggaactgtgcgtattgcgcagctctcggctctgcgtatgcatatccggacggtccggcgtaagaggccgaatggtccgcgacctggccaaatggtctgaaggtatatccggattgtccagccatatatggtgctacgtgggtagtctcgtacccagaccgtctgtcgtaaagaactggacgatccgcgatcgggccgaatggtccagggctgtacccggatggatcggccatatatggcgtgacttgggcagtttgcgcatggactcgtgtagagtcggatggtccagcgtaatacatcggccggttcatgccatatccggacggtccggcgtaagatggcggacggtccgcaacatatccggacggtccgacgtgatgtaccagacggtccgtgatggggccgaagtgtttaggggttgtaccctgatgatccggccatgtacggtgcgacctgagtgttttgtgtgcgggcctgcatctggtcggacggtccggcgaaatacgccggacggtccgcggtataaccggactgtctgagatgatgctcggacggtccggtcgcgtgcctagtggttgcggctgtgatggtgacacgaaagcgtgcatcgacataccatatgatggctaggtcaaaggtgacctgtttatagccgatgtgtttgacgtgggtggcactgtattagactctcgcgatggaaaattaggagcagctgatttctcgtatgcacgtaaatgcattttaatagattcatctacatattgctttaactgatctcctcgttgatccatgaaagttgtaagagatagatctggagtacttacagcgggaccctgcagtggaggtaggagagattccatatcgatctccccttgacggacgatcttctggtggcgatccatcgtgaagtgtgacaagtacttgtccgccgcctccttgcgccgttcggagagtttatgcagcagttccgcctcttccttgtcgcgttgttcgttccattgccgcatcacctccttctcatcgcgcattacgaggtcttcaaagggcctttggtcatcagccgggagcgcctccatggctggcttgatgatgttggtagtggagatcttggtgtgatccttagaaccgaccatttatgggccgatttttagcagatctagacacctattccccagcggagtcgccaaaaagtatgttgacgccttttcggagcgccaatcactcaagaagaaccggcggcggtgctctctggtcagccgcggacggtccgcggcctggggccggacggtccgcgacctggtgtgaggcggcggtgctccctggtcagacacggacggtccgcgacacagggccgaacggtccgcgacctggtgcaggagctcgggttccctgcctgacggccggacggtccgcgccctagggccggacggtccgcgcgtgcgcaggggcggcagaggatcgccggcggcgcctggatctcgctcccgggagggaccccgtcggggaggagagatcctaggagttgtctaggctcgggccggccgacctagactcccctaatcgacgtagagtcgaggagaggcagagaatttgaggattggaatactaaactagggctaaactagaactagactagaactactcctaatgcataaggtaaaaacgagtaatagacttgatttgttcgattgttgggggttcaatcggccgtagcccttcatctatataaagggggaggtctggatccgttttcaactgtttcccgagttaatcccgcggttttaggtaacaaatcccgcgagaaactaggaaccctaactgactctgcgcgcgcgcgaactgtccgcgtcaccaccgcggacagtccagaccgcggaccgtccggcctcggggccggaccgtccgcattgctctttttagagcttaacaaaaatgatattaacttgaatgaaaatcagactatatggatgggatggatctaggagggacaatgggttttagattttacgctataaaatttaagaataaaattagataggatgaaactctatttttatttattttgaactaaaattagtttagtgtcctaacaaattataaaaaaacctttagatcgtgatacattaccacgctctagatggatccgacccattttttaagatgaaaccatttctagcatcatttatttggtaatgggttcctgttgtttgcagttgggttcggaggactcgaaaatgacaatacctgacgtcagaccgtggctgccaccggcgctccgcggagcggccccgcccttggctccgcacttccgcagccggtaccaggatcgctcccttcgccggggcgcctccagggaggaggtcagtggtcaccggcgtggagcgcttcgcgtccagagagctccctccgccggggcggctctcgccggcgtttaattttgaaatgaaatgtgttactctcttatcgggctgtcagagtgaaactagagtttgggccaaacccatgagccatgggctgggcttcaaggagaggcaagcattacgggccggcctcacggcggtggcacttgagcagcaactacagtcaaccttcaagagataaccttagcacgttaacggcggcggcggtgagaaaaggcgggggagggggactggaggtgaaaggcggctgctttcgctgtctccccaccacccgcgcacagtggcggcgctgacggtggcaggaaaggaaaggtagagcatcagtcaccagcgcagcttctttcttttcccctttaccgccgttgtatttcggggggcggcattccttgcctcgctgctgtttcttgctctacggattcactggtggtggtggtggtggcggagctctccgtcctaggaggcgctggtggttttccggattgtttcgtctcgcccctcccctcttggtttgagcttgggttagcttcgtttagacggcctcctccacttgagctctttaacctagacgattggttagtgttcaatttgttgcctgttttattttttttggtttatctgattcggctagtttagctagatgttgatttgtttctgctatctcctttttttgggctatgtatttccgtccatgtcactttccccaatcgagttaccattactgggatggatgttctgtctctttagatttgatgtcataaactcattattatctgagcattcaaggcagtttatactggtaatttaatttgtaagattttcgtcgtcttgctgaggtagggttttgctcagagaccattatgctgtcacaagcttggggtgatgtgactgcacgtcatgtttgacgtggtttattgaatgatacatgcgcgtttgctgctgggcaataaatgttcagacggatttcctgagggaaatagcatgctggtttgattataatccccgagtttaacattcctttttgtgcctttccttttttttgttacagtggcgatcacaccaaactcacatacag

SEQ ID NO: 331 - DNA, 6317 bp, Zea mays
  source 1..6317: mol_type = unassigned DNA
gatagcatagctgaacatgattccctgtgggatgcacaaaactgtttatgttacttgttaagtcacttatgtcaggcctctgatattgtgtttgatactctgtgtgccacttatgttcaatgtggctaatgtctatgctacttcgcatcagtttttatctgaagtgtgtcaaacataattgttaccagaatgtctatttatgttatctgttaacaaattctatgctgttttcatctgcagtttgtgagttggttaatctttttgcttccaatgtttggcttatttgtattatcatattgtttcaatattcaagttttatgcataatatatacttccttattttatatacactaggttcatcttttatccatttttcacgctaattatgctaattgtcaagtgtttatgctatatcctgtttgttatatttgaagtgtgaaaccgacgtatgcactcccatttgattagtattgttaagtgtatacagttttatataacattaatgtccagaccttccgattgctaaacgttcaatgccaatttgttgtgcatatttagttacataatttgtgtaattgtctatatttacgcaacattttatagttttatatcaacgaattatataaccctgtcatgcaaactatttaatttccaacaaactaaagcataagtcattgtgctattacaagtttttactaaatcgaccactctttagtcacacttcaaattattcgcccaaatccatatgctcatcgacttcttcattttccacttcttcatcaatacgatgtttttttgcagtcgatatttcattccactgtggagcagttgttttattgtttagtcttgatccggctggccgtcctctctttcgattagacagttttgctagccttgccctgttctcttccacagacagacatgttctgctgttatgcccatctgctattccacacaaatgacatctcctattcttctttttctctcctttcgcacctagtctcataatcctatcttctgaatttttgattgtccgaccctttggtcttgcacgatccggcatactcagatttataacatccacattaaaattcaacctctgcataataatagacgttactatttagtatacgcatatttacatatatttataccaatcagtaaaatcatttatcaatgctcacctttttagcttctgaggatgcagcaatatgttccatttgttcatgtgctacgtgacacggagaacttgtatcaccaacctcatgtgaaattctcatgttgtcctcctttaaagcccaacccaaatacatcaacatttacatgcatcataaatatatattttcattttagacaaataaacaatattattttaatatgtacctggttaccagttgttattattgttaacgcgtgttcacatccagtcctggtgttatgcgaatcctacaaaatattatttgcttattacattgatattatatattcattatatacaatacttcatgcaagcttatatatatatcttttacataccttattatgacatgtaattgtattgtcatcttccatctcatcgccagcattatttttattcaactcttcttcctggtacaaaataacatgttactatgcataatttatgttacaaatagtataacactaaaacatctgcaatattattaccttgtcttcctcattatcactaacatttgttgactcattacatccaatatctggctccaatcggcttagaacgacatcgagttcatccaacacatacattgccttatcgtaccctgcttttgacatacacgcctgacgaactactttcattgttttcgttaacaacattttctgtctgtatgatttagtaactccatccttccccctgaagctcttatcaattctttcaaacggaacatcttttcttgatgagacagtgtacctttgcaatatatactttgaaggaatcttttgaacttgtagatgcatgaaggctcttaaaatatgaacacacaatagacctgaaaacatgaaaacgaaccattatttcaaaaatatacattaatttgtactacaatcatcaaattctatattttgcaaatttttatgctaaccaacataatacgtacaaacttgtatgttcccactgtttgcactcgcatgtatactccccagcttctatgtctgctgttatcttgaattgatgttgtccccacacaattttattagaccgttttgtatgctgtacgatccattcattatcacatccgtctgggtcctttaatattttgtatgcagtggcgtatttcattgattcctcgaatctattcataacagctctggtgtatgctcttgagactctcacttcgaacctatataatgtatctgttgtccttggtgtctataacacattattatcataattaaacaaattatttacataattgtatgcaaaccgttattgctaacaagcacgacataccttgctcaccaatgcctcctttgattctttcattttcctgttgtgcaacattttcatcatttgtttagcgaactcatgcagtggggtgttcgcatctacatgtgattgcttcactaatctgttcatgctctcacttcgttgtgtagataccattaccccacagaagtcatttttaaaaaatgcaggtatccattcttttcttatttcatataatttgcgtagggtcatatcttcatgaagattgaactcctctagcatcatttcccaggcacattcaaactcatgaagagttaatggatgatgtataatagactggaatgttgttttaaaatccttaacaacaaacctggcatatatctcattcaggaatggcataaatctgttctgtacatgccataagcacagtctgtgaattgtttttggaaatacagttctcagagcaattggcattgcaggatcttgatctgcaattgttcacagattattcagttattttcacaataaattaattcactgttttgcataacaaatttatatatcacatacctgtaagcataactcttggaccctcgcatcccatacatgttttgaatgaattgaaagcccattcaaaagtatgtacagtttcatctcccaacaaaacaaatccaaacactgtacactgcagatggctgttagctccaacaaacatgcccagtggtttatcatatatatttgtcttgtgtgttgtatcaaatgtcacagcatcaccataatctgcgtatcccccctgcatacttgcgtgtgaccaaaaaatactaactattttcccatcatcgtctagctggaaatcacaaaaaattgtggattctgtttcttgcattctctaaagaaagccaaaagtttgactacatcatttgagcaattttctcttctcctggctgccctcctacatttgtttgcacaaaaaaatgttacacacacatttactatagtaatattcctggctattgatatatacacatgtaacaaaaaagtattgcttacatgtttttcagatcttgagcagttaccggtacgttctccggcccatcatgcatttctgatatgaaatcaactatgcaatgctgcggcactcggctatcatgcattgcatccacaaaatttatgaacttagcatccctaattttgttgcaacgtaaatgttgtttctctgcttcgtcagttatgaactcatggttatgctccaagtttaccagttcaatttttgtagctacaaccattttgttttcatcatcatttttttaattttattccagctttgcattgtgtacgtcccgatgatctattcctcatcctaggtgtatcattagattttgctgcacttttaccttcacgtgaacaatttatccacttactgaatgtcttctctctgtatttcttcagtggaaatccaacttcatatgcataccttttatagaatttatatacatcatcaacatccttgaaagtcatccctaccgttggcactatagttggatcaatgttttttgcctgctatttcattgtcattgttgtttgtaccatggaatatgttcacaacaatataatcaatcaataatcaaatacatcgattggacttacatgtgaacgcattatctatggcgtatccatctccctggagctaatattggacataggaggtcgaaccctttgttctccttcttcccctatgctcatctcggcgatctcaggacccattagagcaggcggtggtgtcaccagtgagttaccaccaactcctccctctgtctctggatctagacgaacgccatctccttccatcgccggcgaccctccagagccggccatctccaactccgattagttatgcaggcatagtggttttttttccgaatgaaagtaaatctcggatgctataaaagtaaccgcatccacgtttacagggtctccccattatttccgaaaccgtcccgatattatggcgacgtctttgtcaaactaaaattcataatataaaatttacgcacaatgacacaacgttttacgccaatcggtatataatgtttatgcatctattatgccgcttcggttttatgccatatctttcaacatcttatgcttcatgtttttttaccttccgcacattacttaccatgcaagatccataatttacgcgcccacgtatcccagtaatcacgtttgcatgtggcatatattccctttaattccgcgcaattcccttaccattcaaacaaccgcgtcacggcgccgtctgtcctgcatgccgcctcttagccccacgttaaaacacaggcgcgcctgttccatcggccagacctcgggaaccgacctgggcttcctttaatatccgaagcccagagctcccgttatacctgccctatatatatatcatttcctcctgcctggtttgtataggcatggaggcatggaccgtcaaaatatgcaattgtcttctgctagggaagacatgcataatccgcaggtttatgtggttgtcttccttttagggttgcatcccatacatttgactagaggttagtggtgcttatgtaggatcgtcaaaatacgcaattggcttctattacttctacattcgtttgactttaatctatacctgcagttgcagcagtacaaacaatcagttttaattcgaagcgaacaaccctatacttcccgatcctgttgtacatatacgagaatcggagcgaaagcatttttagcgctacggaagagattcttgtcattcctgttgagggccttcgtatttcgaaggtcctcaaaaacacgactaacatgctttccaagtataatacattcacagggaccttcggccttggaatgaagctgtacacgatatgaaaaacgtggtctgggagaaggatgaaccagttccgaagctgcgcgtggagaaacttcggcttagcggtggaaaatgaaaccggcttaaagaggaaaagactatctagtcctcgatagattgtccgtaagtcaatagtaaatatcaaggtcatgaatgtaattttacacaggctgcgtcctgtgcctataaatagatgaacagtggcaccgtactgtttacgctgacttgtattcactcgcacgtcactcttgggctcataccttctgtcaaaccgaaggtacaaatgtaatttactgttattaatgtttgtccatgataagataatgagaatataaataatctgtcgattcaatatgattgttcattttattctccatgtttcatatgtttctaccttcattatcacgtactgagacgatgaaggtatgtctttcaaaaccttcgtctgaagatcattatatactaaggggataatgtttcgaaggacgaatgtttttaattattaacattttgtattaccttatttttaactcatatcatttgagaaaaagtccccatcaattcccatcccacgacaagaggaaaagactcactcgcgctcatacaacttctgatctatattcttctttttagccactcgcaaaagcgcacgtgtgttgcaccgcgttattagctttcaagttgtcttttgctcgagtggtagacgatgtgtgtgatggtaaacccaacggacggacgacaggcccggtcctttcccaggtgtgggcttccaaatgcagggaaatccgtggctgagttacacgcgggcttctgctatggggaaaggccgggacattcacggcaaacaaggcccagcaaacttcttaattctctgacctggatcggacggcgagggtgtcgcttctcctgatccaatggcgctaccggactcgcacgccacattat

SEQ ID NO: 332 - DNA, 10000 bp, Zea mays
  source 1..10000: mol_type = unassigned DNA
tctctggttccaagaatctttgcctctctatatggtaataactccttttgtcctcttttcctgtttactttgactcaggggcagtgctttcattctcacggtcggtccttttgactgagcggctggactagtttcttctgtagcttattccaggcttcaagggtaagcttcccggtatcttcttgggtaaggtgcttttctcttgagatgggttaagatgagaatggaagcataaggtaaggattagctctaatttgtgatctatgtttttagagaaaacctttcttaaaaagaaagaaaacacacaagctcagcaatgataagcacaaacaaatcaattgttttgaataagggaagaatagagtttttccaaagcacagactactcatattcgggggctaagcataactactattgctcgactcctgaaatgagaactatgctaaccaggacttatgagcactaacgtttaagcatcacatatgcactcaaaaggggagaaaacatcaagcgaaattcattttgaaatgccctaggggcccacacaattagagttttgcaaaacacgagtctacatgattacctctcaaacatgcagggttctagccaaagtgaagaaaaacttcactacccaatgcatgaagaggaccggtcataactaactttagaccaggcagcttctcttctggcaaggctggcacacaacttcaatctgagacatctcctgaatgggtcaagtgggagctgatgttgatgacttcttctggcggcgactgatatggcaagacggggtcgaactcttcttcaagctggactggctcttgtagctcctcagagggcagcggtgctggtggggtgcttgcaacttcttctttgatctcacgggaaggtgctggaatcttcttcatggtgaggggctcaaacaactccggcgggggatcttgggaggactcggggtgctcttgcttattcatagcctgagggaagactggaattccttccaagactatggctccttccgggagttcccaagccttcttctctcctctgatagagaccgggtgaccttcaagaatctgggggtcttcagctctgatgggttgaacagggttggatgaagcgggctcttggatccgcagggctctacattggttatgggttaccaagtaggcctccatcaacttctggacgtgctcatccttggcttgcttcagggcttcaacagcaatgacttcacgactttccaaggcagctacacgagattgagctgtggtgagatccacatggagctgacggttgcgcttctctgcatcttctgctcgggcaatcatctgacggtggtgccgagccaagaaatcatactgtgcatccagggtgagcaggtatgcagtgaggtacacgactgaggggtcgtcctcaagcagctgctgctcttccaatgcacgcatcttggccatccaaactggacggtttctctgaaagggcggaaagaatctgagcggtgtatcggccacttcttcttcatagatctgacacagggccctcaatgccttacgagcgacgacttggtaggtgtctttcaatctgtgcccataagcagtgacactccattccacatggtgcggactggatccaatgtatacagtcacgacacatttctctgtgccatgctcgacgaattcacgactatcatactctggctggctcctgattccgaggcgaactgtgcatgctttcagcaacttggggaaaccatcttcattctagcaaaagctggtttggcaacggacctccatttgacttctgagagaaggaaagggggaaaacatttttaaaatgaagggatgagagcaagatttttataagataatagttttgactcaaaaacttttggatcgggctaagggttacgtcctgcggccaacctaacagctctgataccacctgaagcgccccaatcctctgggactcaaatgtgatacaattactagcccaggaggctagtaaacacatttatacatcagatgattatagatctgcttaaatgagacaaacctataaaggtggcgatcaactttaagagttggtccacaactcgggacatatcatcagagtggggctgaagcagcccgatatacgcagcgaagcaaatctgcggtccaacagccacatgcaaggttgggaacagtcgtaactcttacccgatctcctttttctgaaaaacaacaaataagcaagggtgagtacaaatgtactcagcagcccaccttcacccgcggaatggggaaatcagatataatgcatggaatatctggagctcagaatattttgcagaaacaacaatattttatgcagggttgttttgtaaaacattttgtattttgcaaagcgcatcctctcccaaaggagcaggaagtttttcaatatggaacaaaatcccctggactaaaccatccaggtatctcagcagtttcccactagttttcattttcaacaacagctactggacttcccgtccaccatagctcacggcttaaccgccggaccttttaaaaaccatttttctcaaacacacccttttttgaaaacaaaacattaattgccataccataccagactcgtccattcccatggacacggactattcgaataggttttcaaactctgcgtagaggtgtacactttacccactagtgcggtttctgcgatctcaccgtcgtgagacccgaatgccgaatctctttctttcctcgcacgtcctaaccttaacggttataccggaaggagtcaggccaccgccatgtccaaaccggacacaacattccccctccttatcctcccggtgctccccagccttcataaccctggggttggaccgtacgagttcagattgagtgactgcccacacagtctcgagtggttgtacttatcatgagtacaggtagtgaaggatgacaaactagtccttatgtgaggggacaatccttctgctcacacctaaaccagctgagccatcaccttaggccctcccctaaaccagggagtccctgatcatccctactcaaaggtgataagggtgaaaacccttcatcatacacattttgaaaagcattttcttttgaaaactcacacctttcctcaaatcatttgtaacaaatatatcagggattgatcgcggcaagcggctgggtggccataataacttgtctcaaaatcatatcatgcataaaataacaggctgatggttgtggttgaaaaacataggtaatttatgcatcaacgggatccagtgagcttgtcgtgcttatccggcgaagggggaagaggagctcgcagaactggcttgtccactgcctggcgtagacttgcagatctggcctccacgagacggcacgaacactccgataactatgcaacatgaacaagcaaacatacaaaccaacaagtataccaacaaatatttagtatagtggtcagaatagtgatatatagatgggtagagtcttgagtagaatctgtgtcatgtggtgttgagatactgctggtggtggagcgaaggtgcttaccaggagggtggactggagacgaagcgacactatgtgtgtagccggcagagcggagtaactaagtgggtggggtgtttgccttggctgagggtgttgagtgtgtggagtgggagagggtagctgggtgtatttatagctgagtgtatgtggtgtagcacagtgaagttcactgttggtgagaatagtgacgaatgaatcgcctgacttaatatgaacaggagagttataggcagaatatgggacaagagtattttgggagttttctggaatatgaaccatgcttaagggatcacatggttggatagggaatagtttgacaagaattttagtaacaagaatgactgaaatctgagtttggatggaggagttttggattttataatcatagggagaaaaagaaaaggaatattctagaatttgaatatttagagatatttggaaaatcaaaaatacaaatgtatttttgagcggggtgcgaggaattatttttgggcttttcttgggcagaggtttatgttggtggaaaatgttcctacctactgtgtcacatcagacagcagtgaggcgggacccgaatagctggaatgctgtggtattctggtccgagtgggctgtggtatcttgagccaagttttataggattgaagacgtatccatacaaacatggtttgcctttctttttggaagtctggcttgaaagaatcccaaagttaagcgtgctcaacttggagaaatctgggatgggtgaccagatgggaagttccctactggaataaaaaacacagtcaccggagttcgtatgactggaatatgggtctggctggtcttaggtggattggatagcatgatggatgagtagttgaaatttagggcgatcggatgatcgatgaatagtaatggtgaatagtaacagtgaacagtgatggtggatagttcgtatgaacgaacgatgaacggtgaatagtgacgatgaacgatgaataggaactatgaacgcacgatgaacgatcgaatgatcgaacgaacgaacgatcggaatttcggcagcataacagcaggaaaaatattatttggacgaacaaacggacgaacgaaccatgaacgatcggacgaatgatcggacgaacgaacgaacaaactaagaacaggggggacgaacgaccgaagaacgaccgaacgatccttgtgctagtgggtgcttgtgtgggaggtggagtgggagtgggcgtgtggggggggagggagttgccatgaaatggcttggggtgggatgagaggaggcccttgcccctctatttatagccatggtggggggattagggggagggatgagaggattagtgggaggatgagaggattagtgggagattagcatggatttgtcttatatgagtgtaattagcttgtagagctcaccgtatgacaccggaggcatacgtatacgtatgggcatgaggaaagttatgaagaaaatatttgtagggacttgaaaaatgattctgaaggtatttctcaagaggaaaatacttggagatatatcggtggaatatctaggcaatatttctggaaagaacttgaaggggatcactagggaaatatcttggcagtatttctagaaagaatttgagggcgttcactagggaaatatttgtaggatattttgaggaggattttggagagaatatagaccactatatgttatttgctgatatcaactcgcaaacaaacattttggaatgaagtttgaaattcattttgaatttagagcgagtttgagaaaatttcatgatttgaatttttgggatgctacactgcctgcctcgccacgccacgcccgagcccggcccggccggcggcagcgagcgtgcgcgtgtggcacacccttgtccgtttctttacttctcaaattaagtagaataattcccaccatataagtcaagccaacgacccttagacttccaatatggtactattggtattctccaccattacacaccatagagtttattgaataaatgggccaagcccataaaagatccaacaatccccaccaaactctagggtttgtaatgatgaagtatcagaatcacaatcctttgatataccagtgtttcgatggaaactgttaagttgaacatccatctagaataagagtttcacttattcacaactaaacaatgtgtaaataccatcctgccttacagataggaaagatgtgcatcagaaatgagttaaggaagggatctttcctcacaacctactcctagcttgtttctccactctacttcacgggatctccgatcacatagagcaggttaccactagagtagatttcacatgggtctcatacccatttctctcgatgcactttctatcacattgcgtgacatacccttagtgaattgatctgccagattattcgatgtgtggacataatccaccgttataactccggagtttttcagctttctgacagattccaatctcctcttaacatgccttgtagacttcatgttattcctagaactgttaacctttgtaatcaccgtttggttgtcacagttcatggaaatagccggtatcggtttttcaactaccggtaaatccaataggaaatcacgaaggcactcggcctcagccccaacactgtctaatgttgcgagttatgcttccattgtagacttcgttaagatagtctgcttgcgagtgtggcacgccacgccacgcccgagcccggcccgctggcgccagcggcggcgcgcgcgcttgtggcactcccttgtccgtttcttgacttctcaaattaagtggaataattcccaccatataagtcaagccaacgacccttggacttctaatatggtactattggtattctccaccattatacaccatagagtttattgaataaatgggccaagcccataaaagatccaacatccagctcagtctcctctccctattcgacactgcattgttaatggtgtcaggctttgccgaacgtgcgtcatggtcatgggggtcgcgagagcccgaattttatactccccaagggagagtccggccgacgggccgagcatcgatcggtgggaggatcttccggaatcgcgctaaccgaattctgtttgtaacaaactcgaggtgaatgacaatcctgacagggcagtcccacatggtggtgacagcaacgatgcaggcgttgaagatacaagcgcgcggagaccgacaccgcgggcccgcttgtcagcaccgcgacgagttccgggctggcaggagttgggtcgaatggtgagatgggtcggctaggaggcaaggagaaggcccaagtgtgcagtgaggtactcttttttccttttttctattttattttcagttttctattatttcctaaattcaaatagagttttgaattccagattaaatcctgagtgtaagtatctatctttgatttagatgcacagacaatacttcggcatgagtgcaaggttcatttttaatctattattaattatcctagttaaggaaatgtttttagatatgcaattcatacatcccaaactagatattttaagaaaagattatttctagtgtataaaatactttagagagtacttataaatatatatgtttcgacaaaagaataactaaattcatatatgtatacttttattaaatatttttttctccaaaaaaccatgtttgttttataagaagtgtaagaaaatcattttaaagaaatttttaagtccatttaaaagaaactttttaatttcggtatttggagaagttttcataaatcccaaaattggattttgaggtgttacaagaacaaaacaccatcaacattttgcactggacgttggacatggtaaaagagtatttcttttcctttttgcaattttattattttgattttgaaggacgcttacggccactatgaagatgaagtggtccaaagggttcgagatctagaaagcgacggattactactattgtgacgacttgatcgattctatgttcatgttgattttaagtggaattaaaaaacttttcaaaataattttataagaagtgttaaaattttctacgtgagcctttaaaatagaattaaaattttctttaaaataattttataattttcttaccctttagaccaaaaatttgattttgaggtgttaaaagggaaatatgaaggatttttaaaggaatcatatcctacaggaaaattttctacgtgagcctttggatcacaagattcaatcccattaattcctttgaaatttctatagattgctttcttccgtacaagttttggaggaaaaataacaagcggcccaacctcttgtaaactttcctatgattcttatctatctattcaagttcatacatagcatccaaaggccatgcaagaattttttctgcgtactcaaatcatataggattatgattcataaccaactctaatcatgtgcttttcttgttcctgtgttttcatattcttgtgttccaaaggaggctttatctttgtagaatttttatgtattttgtgctcacaatgtctttgggtcctgtttgatatggcaccaactccatagatttttgattcactccacaactccagatggagagttggagttgcatgggaggctagcaattaaaaagaagtttttacaggtgatatgacattcttgccaagttcaacggggttagtggcgcgaccgcacgtggccagtgatgccggcacacatggcacagtcgacgcaacggggctaggggcacgaccatgcgtggccccaggcggtgcaactacgcacgactggtgcgtgggagagcgcatggccgatggtggctcaggcttgcaaggggacgggtgatggggcctgggggcgcacgatcaatggtggaccgagagctcaaggtcacggacgacagggcaaagagcctgtttggtttagctttttttctaaccatctttttctgagaatctggctatgaagagaacctagttgtgggaagaatctaggtatcatggggattacgtgcggataaagatgaagtagtccaaagggttcgagatctagaaagcgacggattactactatcgtgacgactcgatcgattctgtgttgtcatgttgattttgaaccgtttttaccaaaacgattcttatagaaacgggctgaaaagctagggcatttggcagtccgcaacagcttttgatatccagaagatgaaaaaagcccaaacaaatagggtcgaaggcggaagcacgagagcgagtagaggatgctgagagaaaacacgattcgattgataggatacaagggaaaatataaatgattttttatttgatagcattgatgagtaaataccaccgaattggtttgaagttgaaaaactccatatccaaatgaactagttacatcaactctatcaagttagtctgctcaaaaaaggtggagtttggatgtttggcaggttccactaaattattgcctagagattggtgttgtaaccatgctaagcaagtcctttgtgggcacacaggttcgacaacatcgagctgctccccttttttctcatcggaggttttttatctttagaactgcttataccatctctaacagttcattcaaagtttactcataaacactattttgcaatgttctgcactgtagactgcattgttcgcggagtgaagtttaaatatgattatggatgtaggtaagcttattggagatagtcttagagcatcttcaacaaggtggctcatcatagtaccctaaaaattaaaacactacatcatttaaagtgtttaggatactaaaaacaaaatgcgctccaacaattaagcactaaatcatgtatttttggaagtgaattacattatttggaaagaaaatattgagaataatgtagaaaacaaatatagtgcactagcgtgggtgtagtatatttgagtcactttatgaagtgtcatatattttataataaaaatttacaaaatagagtattgttggaattatttttttatgaattgtgctttatatctgacactccttatcttattctctatttaaaacttcgctttataagtaatatagtctacaataaaaaaaacacttagcacctatttagcggtgattgcctcaggaaatactagcaacacggaaccacaccgagccttgcatcgagattcacgtgcgactagggtagggaccatttgtgctgttaaatcaggcttgcgctgttgattggacccggcccatagtgccctgtaacttgctcggcccactagggttttggggtggcatataaaagctgccctcgcgacctagcaccagcccagccactccactcctaccccacacagaagcggcggcggcggagcaaacgcaggcgaaggcgagggtgtgagggaaggagcaccagcc

SEQ ID NO: 333 - DNA, 10000 bp, Zea mays
  source 1..10000: mol_type = unassigned DNA
ttccggcttcgcaaaggggaggagccacaacacatgtacaaccggctcaagaccttggtgaatcaagtacgcaacctcgggagcgtaaagtgggatgaccacgagatggttaaggttattctaagatctcttattttccttaaccctactcaagttcaattaatccgtggtaatcctagatatactaaaatgaccccgaggaagttatcgggaattttgtgagttttgagtgcatgatcgaaggctcggggaagatcaacgagcttgatgatgccaccacatccgaagctcaacccgttgcattcaaggcaacggaggagaagaaggaggagtctacaccaagttgacaaccaatagacgcctccaagctcgacaatgaggaaatggcgctcatcatcaagagcttccgccaaatcctcaagcaaaggagggggaaggattacaagtcccgctccaagaaggtttgctacaagtgtggtaagcccggtcattttattgctaaatgtcctatatctagtgacagtgaccgaggtgacgacaagaagggcaagaggagagaaaagaaaaggtactacaagaagaagggcggtgatgctcatgtttgtcgggagtgggactccgacgaaagctcaagcgattcctcctccgacgaggacgccgccaacatcgccgtcaccaagggactcctcttccccaacgtcggccacaagtgcctcatggcaaaggacggcaaaaagaagaaggttaaatctaactcctccactaaatatgagtcttctagtgatgataatgctagtagtgaggaagataatttgcgaactctttttgccaaccttaacatggaacaaaaggagaaattaaatgaactaattagtgccatccatgagaaggatgatctcttggactcccaagaggacttcctaatcaaggaaaataagaaacatgttaaggttaaaaatgcttacgctttacaagttgaaaaatgtgaaaatttatctagtgagctaagcacttgccgtgagataattgacaaccttagaaatgaaaatgctagtttaaatgctaaggttgattctcatgtttgtaatgtttcaattcccaatcctagagataataatgataatttgcttgctaggattgaagaattaaacatttctcttgctagccttagattagagaatgaaaatttgattgctaaggctaaagattttgatttttgcaatgctaccatttccgaccttagaactaagaatgaaatgttgcatgctaaggttgtagaacttaaatcttgcaaaccctctacatctaatgttgagcatgttactatttgtactagatgtagaaatgttgatattgatgctattcatgatcatatggctttaattaaacaacaaaatgatcacatagcaaaactagatgctaaaattgccgagcataacttagaaaatgaaaaatttaaaattgctagaagtatgctctataatgggagacgccctggcatcaaggatggcattggcttccaaaagggagacaatgtcaaacttaatgcccctcctaagaacttgtctaactttgttaagggcaaggctcccatgcctcaggataacgagggctacattttgtaccctaccggttatcccgagagcaaaattaggaaaattcattctaggaagtctcactctggccctaatcatgcttttatgtataagggtgagacatctagctctaggcatccaacccgtgccaagttgcctagaaagaaaactcctattgcatcaaatgatcatgctatttcatttaaaacttttgatgcttcttatgtgcttacaagcaaatccggcaaggtagttgccaaatttgttgggggcaaacacaagggatcaaagacttgtgtttgggtacccaaagttcttgtttctaatgccaaaggacccaaaacagtttgggtacctaaagtcaagaactaaatttgttttgtaggtttatgcatccgggggctcaagttggatactcgacagcgggtgcacaaaccacatgaccggggagaaaaggatgttctcctcatatgagaaaaaccaagatccccaacgagctatcacattcggggatggaaatcaaggtttggtcaaaggtttgggtaaaattgctatatctcctgaccattctatttccaatgtttttcttgtagattctttagattacaacttgctttctgtttcccaattatgtcaaatgggctacaactgtctttttactgatgtaggtgtcactgtctttagaagaagtgatgattcaatagcatttaagggtgtgttagagggtcagctatacttagtagattttgatagagctgagctcgacacatgcttaattgctaagactaacatgggttggctctggcaccgccgactagcccatgttgggatgaagaatcttcataagcttctaaagggagagcacattttaggattaacaaatgttcattttgagatagacaggatttgtagcgcatgccaggcggggaagcaagttggagtccatcatccacacaagaacatcatgacgaccgacaggccgcttaagctactccacatggatctattcggcccgattgcttacataagcatcagcgggagtaagtattgtcttgtaatagtggatgattattctcgcttcacttgggtattctttttacaggaaaaatctcaaacccaagagactttaaagggattcttgagacgggctcaaaatgagttcggcttaaggatcaagaaaataagaagcgacaacgggacggagttcaagaactctcaaattgaaggcttccttgaggaggagggcatcaagcatgagttctcttctccctacacacctcaacaaaatggtgtagtggagaggaagaatcgaactctattggacatggcaagaaccatgcttgatgagtacaagacaccggaccagttttgggccgaagcggtcaacaccgcctgctacgccatcaatcggttatatcttcaccgaatcctcaagaagacatcctatgaactcctaaccggtaaaaagcccaacatttcatactttagagtttttggtagcaaatgctttattcttgttaaaagaggtagaaaatctaaatttgctcctaaaactgtagaaggctttttacttggttatgactcaaacacaagggcatatagggtctttaacaagtccactggactagttgaagtctcatgtgacgttgtgtttgatgaaactaacggctctcaagtagagcaagttgatcttgatgaaataggtaatgaagaggctccgtgcatcgcgctaaggaacatgtccattggggatgtgtgtcctagggaatccgaagagcctccaagtgcacaagatcaaccgtcctcctccatgcaagcatctccaccaactcaaaatgaggatgaagctcaagttgatgaagggcaaaatcaagaagatcagccacctcaagatgatggcaatgatcaagggggagatgcaattgatcaagaaaaggaggatgaggaagaaccaaggccgccacacccaagagtccaccaagcaatacaaagagatcaccccgtcgacaccatcctcggcgacattcataagggggtaactactcgatctcgggttgcacatttctgtgagcattactcttttgtttcctctattgagccacacagggtggaggaagcacttcaagattcggattgggtggtggcgatgcaagaggagctcaacaacttcactaggaatgaggtatggcatttagttccacgtcctaaccaaaatgttgtaggaaccaaatgggtcttccgcaacaagcaagatgagcatggtgtggtgacaaggaacaaagcacgacttgtggccaagggatattcccaagtcgaaggtttggatttcggtgaaacctatgcacccgtagctaggcttgagtcaattcgcatattattggcctatgctacttaccatggctttaagctttatcaaatggacgtgaaaagtgccttcctcaacggaccaatcaaggaagaggtctatgttgagcaacctcccggctttgaagacagtgagtaccctaaccatgtctataggctctctaaggcgctttatgggctcaaacaagccccaagagcatggtatgaatgccttagagatttccttattgctaatggcttcaatgtcggaaaagccgatcctacactctttactaaaactcttgaaaatgacttgtttgtttgccaaatttatgttgctgatattatatttgggtctactaacgagtctacatgtgaagagtttagtaggatcatgacacataaatttgagatgtctatgatgggggagttgaagtatttcttaggattccaagtaaagcaactccaagagggcaccttcattagccaaacgaagtacactcaagacatcctaagcaagtttggaatgaaggatgccaagcccatcaagacacccatgggaaccaatgggcatctcgacctcgacacgggaggtaagtccgtggatcaaaaggtataccggtcgatgattggttcattgctttatttatgtgcatctcgaccggacattatgctttccgtttgcatgtgtgcaagatttccaatccgaccctaaggaatcccaccttacggccgtaaaacgaatcttgagatacttggcttatacccctaagtttgggctttggtaccctcggggatccacttttgatttaattggttattcggatgcccgattgggcgggggtgtaaaatcaataggaagagcacatcggggacctgccagttcttgggaagatccttggtgtcttgggcttcaaagaagcaaaatttggtcgctctttccaccgccgaagccgagtacattgccgcaggccattgttgcgcgcaactactttggatgaggcaaaccctgcgggactacggttacaaattaaccaaagtccctttgctatgtgacaatgagagtgcaattaaaatggccgacaatcccgtcgagcatagccgcactaagcacatagccattcggtatcattttcttagggatcaccaacaaaagggagatatcgagatttcttacattaatactaaagatcaattagccgatatctttaccaagccacttgatgaacaatcttttaccagacttaggcatgagctcaatattcttgattctagaaatttcttttgctagcttgcacacatagctcataaatgtacctttgatcatatctctttcatatgctatgactaatgtgtttttcaagtgtatttcaaaccaagtcataggtgtattgaaaggaaattggagtcttcggcgaagacaaaggcttccactccgtaactcatccttcgccatcgctccaagaaaaggaccttatttttggggagtaagcaagagcccaaaggaccggacttcgtctttggtataatcttaactcatttaattatgaccaaaggggaagatagtacttcaatgggctctaatgattccgtttttggcgattcatgccaaagggggagaaagtatgagcccaaagcaaaaggaccgcaccaccaccaatttcaaaaacttagtgctttccaagagtatttatcaaatggtatcctattatgttcaaaaggggggagaaagtagtatttcaaaatgatatatcaaaaccctcttgaacactaagaggtggatcttctttagggggagttttgtttagacaaaggaaaagcatttaaaacagggggagaaaatttcaaatcttgaaaatgctttgcaaactcttattcatttacctttgactatttgcaaaagatctttgaaatggatttacaaaagaatttgcaaaaacaaaacatgtggtgtaaaagtggtccaaaatgttaaaaataaaagaaacaatccatgcatatcttgtaagtatttaatattggctcaattccaagcaacctttacacttacgttatgtaaactagttcaattatgcacttctatatttgctttggtttgtgttggcatcaatcaccaaaaagggggagattgaaagggaattaggcttacacctagtccctaattaattttggtggttgaattgcccaacacaaataattggactaactagcttgcccaagtgtatagattatacaggtgtaaaaggttcacactcagccaataaaaagaccaagttttggattcaacaaaggagcaaaggggcaaccgaaggcacccctggtctggcgcaccggactgtccggtgtgccaccggacatgtccggtgcaccagggggactcaaactcaaactcgccaccttcgggaattttcagaggcgactcgactataattcaccggactgtccggtgtacaccggacagtgtctggtgcaccaagggaggtcggtctcaggaactcgccagcttcgggaaactccaacggctagtccactataattcaccggactgtccggtgtgcaccggactgtccggtgcgtctccggagcaacagctatgtccgcgccaacggctctctgcggtgcaataaatgcgcgcgcagcgcgcgcagatgtcaggcgcgcccatgctggcacaccggacatcaaacagtacctgtccggtgtgcaccggacacccaggcgggcccacaagtcagaagctccaacggtcagaatccaacggcagtgatgacgtggcagggggcaccggactgtccggtgtgcaccggactgtccggtgcgccatcgagcagacagcctcccaacggccacttttggtggttggggctataaatatcccaaccaccccaccattcattgcatccaagttttccacttcccaactactacaagagatctagcattcaattctagacacactaaagagatcaaatcctctccaattccacacaaagccctagcaactagtgagagtgatttgtcgtgttcatttgagctcttgcgcttggattgcttcttttctttcttgttcttgtgatcaaaactccattgtaatcaaggcaagaggcaccaattgtgtggtggcccttgcggggaagttttgttcccggctttgatttgagaagagaagctcactcggtccgagggaccgtttgagagagggaagggttgaaagagacccggcctttgtggcctcctcaatggggagtaggtttgagagaaccgaacctcgggaaaacaaatccgtgtgtcacacttcattatttgctcgcgatttgttttgtgccctctcttgcggactcgtttatattcctaacgctaacccggcttgtagttgtgtttatatttgtaaatttcagtttcgccctattcaccccccctctaggcgactatcagctaccgtcgcccacatccgtcgccctcgccacaggggtcataactatatcgtgtctaactaagttgttcaaccatatcttcggtcgaataagatgcttgacaaatggacgagaaggtactgatctacaagaataagagagatgcaaagttgtaataactatcaggtgattaatttgatgagccatactgtaaaggtatgaaaaagagttatcaagcatcgtttggtagaataattgagggtgttttgggtcattttggtttcatgcttgtaaggtcagccatgaaagccattttttaacaagacatgtgatggagcagcatggggaacgaaagaaacatctacacatggttttcattagattgtagaatgtcgatgataaaatactaacgaacgttatgtattgggctttgaacaaacacaatgttcgaaagaagtatgttggactaactaagaacatagcccacatctagtcgccctcctcctccgtttgtgcatacttcaccataccaagtaaaagaagatggtgactagttggttaaggtttgtttgtgatacacatattattatggggaatactttgcatgttaaaaaacttgtatgacaaataatttgcatgcaattagcccttgaacgtgcatctagtcgctaagtgttattttggtggattgaacgttaagacaattaaagggcctaatgtgttctatgggattgtaggtgtctggttccatgtgagttgaattaatttgggttcagatgtagcaaatggcatacagatgagaaactagcccaaaccatcttgaaagaatgaattgacaagcttatgttcatcgtttacaaataagatatgggagtttgcatgcagaatggtgtcactcttgaatcttgatcaaccaaaatgaagattgacattcgtaatagcgaagacaacaatatagatgaaattggtatatttattgtgtttaatggttgattcaagacgtgactccatggcgtgagatggtaaacataaaaggagagtcttcaaagtactaagcaatcatgaagggcaagcgacgacttgacatatgacaagagctactggttgtgaaacatgaagggtaaacataaaaggagagtcttcatgccctatcttgtgtacaccgtcgtgacactaccaggcactagatacgaatcaagcacgtgccaagcaaaacaacccacaaccgaccccaacatttaaacaagttcactagaatattcgccgagtaagccatataacgagagctactgattgtcaaatactttaattagacctactagttgctaggaggtataaatagactcataatattgtttgtgtatcatgtatgtttttttgggtcatcaattttgaaccaacaacctttatatcttacatctacattattcactatttcgaacactactttataaatattatcgtttacaatgcaaaatattattttaattacacgaccatatcaactagtgtgaaatatatcgtcattgattggtaccggctacagtgtcaccacatcgggcccaagtgtgtgcagcaaatcgtgtacataatgtgtaaaaaattatatcggtaggttgtattgtttattgaataaagttttaaaaggtgtgacatagaatctgatgaaagcatcattaccgtggtactacatctgttaaaaaacatacgacgccgtcttattaaaaatcatgctttatcgtttattttatgatttgttttataatttaaggttaattgagtgtggctaaaaaattatactctgaataaatatttataataataggaatgattaaagttttgaaaaaacaacgcctcgaactgagagattagcatcataggctcgtagcaacggccaggaggctcctggcccatcggcagcgctgccgctctccatttcaaaatttgaaaatatcagcgcggcaggcggcaccgacgaaccacccgtccaaatcgacaaacgcgcggccgtctcacctcactcacctataaacgggtcccaccgtacgtctggcccacagggaggtccggtggtgctgtcctcccgcaccgaacgtgaggtgaacagaccacctactggtatttttagacctacacaccttgggagtacacatttgtgacacgcataaaactagagtacaaaaaaagtgtgtggggtccatggaacagaggcagcggtgggttgtggttgtggcaaactcaggtaccaacaaaaagtagatcagtacatgccagctccaacctccaacctccaagcctacaaccagatcagccggtctggtactgtgcttctgtggcacgaaaaaaccgaccgttgcacggacgagaaacccgaaccgtcgaaacaatcgtaatccccaggggctcaaacgcaaaacaccgtccgctcccctcgctttcgcttcgccggcactccatccgtccatcgtggcccaggctgtcgttccgttctataaagggcgtcgagaggaaaccggtggaaccctacactgagaaccgcagagacaggcgtcttcgtactcgcctatctccgcgactcaaagctttccccaattcccccccttctcccatttctcaccaccgccgccgctccccccgttcaacaacacc

SEQ ID NO: 334 - DNA, 752 bp, Zea mays
  source 1..752: mol_type = unassigned DNA
tcgtataaactatttttatctaatagtctagtctacaatatcgtaccacctaaaaatttgtcctgcgtccatcactgtgcttgttgtttggaccaccaattcatcctaaaacctgtaggtttcaaaatggttgtatatttctcttgatcaagcagttttggacatagacgtgtccatcttgaagtgcggctttgccataatcaaatcgaaacagcagaaaggcctgaaagggaataacaaaaaaagatgaatggtctggtctttacctaacccagtgagacttgtatgtcttcttagggggtgtttggtttctagtgactaatatttagtctctacattttattccatttaagttacaaaattgttaaatatagaaaccaaaactctattttagtttctatatttgacaatttatacactaaaatggaataaaatgatgagactaaatatagaaaccaaagagcgatgacgacgcaatgaacaaagcccacgataaggcccaggccagcccaagcttctgcctcgcgaaaaccctaacaattccagcccctatataaccacacccacgccgcctccgcccgaaccctagaatccaccctgccgcctcaccgcctctctcaatctggtatgtgccgtccgtcgcctcagtctcttcccgccgccgcttcggagactaacttctctccctttgttgttctctcttcgcagataccgcagatccgtcgtccggtgagtggaagccgcacgaaccc

SEQ ID NO: 335 - DNA, 6944 bp, Zea mays
  source 1..6944: mol_type = unassigned DNA
acagaaaatttccaagaggaataccacccctcattcgaggctcgagggatccctcgggtacggtattagaggtacccccaacactcctaaacacggctgataagcaccctcagcacaaactgcaaagactgatgggcacggttcaggtcaaggcctcgtctaccaagggacgcagtctcgcctcgccccgagcccggcctcgggcgggaacagtagtcccggacgaattcacgcctcgcccgagggcctcctcaggcagtgggcgcaccctcggctcacccgaggcccagctcgggcaggcttcgtcgagaagcaaccttggccaaatcgcctcaccaaccgatcgtatcgcaggcgcattcaatgcgaggatcgcctgacaccttatcctggcacgcgtgcctcagtcggcaaggtcgaagtgactgcagtcacttcgctctttcactgaccgatctgacaggaaaacagcgccgctcaccccgctccgactgttgtgccagccacctgggcaaggctgacaacagcaagttcagcctcgggcgcaacaggaagctccgcctcgcccgaccttaggcctcggccttgggaggaggtctccgcctcgcccgaccccaagactcggcctcagcctcggcctcgggaggaatcgcgtcctcgcccgacctcagcctcggcctcaggagaagtctccgcctcgcccgaccttgggctcggaccgaccgcgccacaggggatacatcattaccctacccctagctagctcaggctacgagggaacaagaccggcgtcccatctggctcgccccgataacaggtaatgatggttccccgcgtgcgtccatgacgttggtggttctcagccccctacggaagcaaggagacgtcagtaggatcccagcagcaccgccagctgtgcttctacagggctcaggcacttctccgacggccacgttatcgcgtacacagggctctagcacctctccgacagccacgttggcatgtacacagggctcagacacttctctgccagacacgttagcgcataggctacaccccccattgtacacctggaccctctccttgcatctataaaagggaggtccagggccttcctacgggagggtcgcgcggagggacgagcaaacgaacatgctcactctctctctctcgcgaacgcttgtaacccctactacaagcaccccctggtgcgagataacacgagccgcatttctctcttgtgttccatcttgcgccaacccatctgggcaggggcacgcagcgacaaaattcactggtcggcccggttgagggtcccccggggtccgaaacgccgacaacacagcaactacaattctctttttgacaacgatcaactttgtcctgtttcatttcccaaagtcatacctcaaggtgtctattatagtattatcccatgttttactatcagtgttagggtctgtttggttgggctgtggctgtgaaaaaagttgttgtgggctgtgagctgtggaaaaagctgctgtagactgtaagctgttaaaaagctaaaatctgtttggtgaaaatcactaaaagtcgttaaaaattcttcgatatatgttttcacagttccatccaaaaagccactaaaagcaggtccaggggtgctttcagatttgcactacgagaaagtcggcttttagaaaaagctgcttcctggatccagccttttggttggcttttagcttttaggggggcaaaagccaaagccaaaagtcaaaccaaacacacccttagtaccccttcactatgatgtgttttcccacatctataaaatacgatctttggattgaaatatttaaatttagtactcgagtttatgtataacacttgggacactgttgaaaagaaaaagtacattaataacaagatataatatcttagggggtgtttggtttgtagggactaatgtttagtcccatcattttattccattttagtttataaattgccaattatagaaactaaaatatagttttaatttctatatttagtaattttagaactaaaatggaataaaatatagggactaaaaattagtccctagaaaccaaacacccccttagttacttaaattacaaattgtgcttctcacgcgtcttgcgcgcataatacactagttttctatctatctatctatcttctatatattaaagccggaagcaaagactcgttcccagcgtgtctacttcacgttttacattttcagccattggatcaaatttcaacggcagcaggataacgttcactctcgcctccttcaatagtcgcgagacttctagccgcatgatcacaaaccaacagcaaaaaaaaaaacgcttcacgtttctgagctgcagctaccatcggctgatgagagactcttcgagaaaccacgcgatgcgtcctctgtcctggaaaaaaatttgctacggagagaaatttggatttatgtcattataaaaattgggttttgccaaaacgccatcatgtgaacgtgtttcactaatacaccagacaaaatgctatttaggagttattatatgaaacataaaataaatttagctgaacgttagcttctagactgactgttttgcccctagatgaaataaagagtctgtgtatcggccggctctcctctgtcagttggctgccgcggctcagatcatcttgccgctgcgcctcaggttctggtgattgcccaccgatgcccgcccgcccagctatgcccggctacacaactcaatttcagtcacctaaacaaatgggcaccacgaactgctagagggcaccatgaagaaaataactgctacaaagtaatgagtgaacaaggttacaaattgaattggtctcaactggtaggtgtatataaaattggaaccgaattgatctgacagctgcttgaattttccatcttacttgctgagccgaagtagttgaagttggtggataagtcaataccagtgtacggcgtccagaatactacagtgacaaggctagcctaacccaaagtgaaaaaaaacagtagcatccatgctaacacatgatgaataagatagctgttactgttgctagctggtggagggtgccactggtggagtagtggggagtcgcacgccgttggtggaggtcgagtggagctgggcgtcgccgccgccgtctagaccatctggatgctgaatgaaatttggttccaagaccttgacgcaatggagggggctcaactggtgcttaaatcagttattagtgctatttttatagctcagtagattatggtaaaaaatagcagttatcagtgcttaaagaaaccaaatttgtgatctccaaatcagttcgaagttagcacttatctccaaatcagttagctgttatcagtgctataactttgtgatttggaggtcacaaagaaggtgctcctccaaatcttcttctattactaagctagctaacgtcgccgtacagatatttatagttgtggccgcttaataatcggaggtgccctactttaactgatcacaaatcagtataatattagcatagagacttcccacaaagaagtagcacaaaataaatgagatgaacagacctttatgttgtgctccaattgatattgcgtcatagtgcttaaagcgcaatgttatcttttatagttcagtagattatgaaaaaaaaaaactgatttggagatcacaaagaaggtgctcctccaaatcttcttccattactaagctagctatcctcaacgtatagatatttatagttgtggctgcttaataatcgaaggtgccctaatccaactgatctggagctcaacttcccctacgtgtgatgtgagtaagcggtgagtacactaccgaatgctacatggtctacctttagccactcactgcacgtatcctcaaacttgacaaacacttacataagttgaacaaagttaatcagtattagggtcttgagaaccatataagttaaacaaccacatgcagaaatacacgtaggccccgtttggatcattggaattgaattccattttaataatagtaatttaggcatatatcaattaagctaattcgtttttatgcaaaatatatttatatattattattagcaagatgtcggatatatttatgtgctatatttttactatagaggagtggaacgaagagtgtcatgtaagttacatagtagaaataaattctagtaatgcataaaatcatttcctatcctccaccctatgaatttgagatagtcttatatcttaactttggaaagtggtggaatgccaaattccaaactaaataagttactttattgagtgaattctaattccattaaaatgaagggatccaaacaccccggtaaggaaaatgatgtccattttgacatatgttggctatgctcagaatggaaggccttgtgactgaaagtcacctgttgttttcccatctaaggcatcaccctaacaagtttctaattgttttagtatgtaagctgcagccaataatccacagatgcttaaaacaactttttttccatgtcagaatgttagaataaataaatctataactaattaaaaaagactatacatctatttttaaataactcaaacatgtgagcgcaagttaataatacaatttattacaataagtgcatctattaccatccaaaacacttaaaaataacttaaatacataataaagcgcgcagaagggcgcgccccagctactagtacgtatacataccatgtaaactagtaggtctgttcagcccgtgccaaaaagtaaaaagtatatggttccatgttgtcagctcggtctgggtgcaccggactatccggtggtgcaccggacagtgtccggtgcaccaggctggctcttgcgaactcgctgctctcgggatttcatcggcggcgtacgtctataattcaccagactgtccggtgtgcaccggactgtccggtgagccaacggtcggccgggccaacggtcggctgcgcgatctgcgcgagacacgtggtcgagccaacggtcgggagggggcaccggactgtccggtgtgcaccggacagtgtccggtgcgccaacggctcccaggtgccaacggtcagcttcgctagagaaggaaagaaatcggctaccgaggcaccgagttgagacctctgctgagtacacacagtatgtggaacggaaaatgagaatgaagcgcgcacatttaaaatatgttgatgctggtgtcaaataactatttggcactagggcgcccaatagccacaattgtacatctatactactctattaagagtgtagcgtcagcgtctacacctgtccccgctcacgcgcctctggctgcccctgcccgcgccccatcattcacgcccccatccgccccaacatcctcagcgcccgtgcctcgacattcactccacacgccaccattctcgcgcccacaccccgccattcatgcctccacgcgtcgccccgccaatccccttccatcccacctcttccctgcttgactcctctcagctcatctcctcttccccaccagacggtctaactccctctcccaaaccctagggctcgagcctgcctcctcaatgagatgcccatgggccatggcagcggcctctgcccgtcgcagaggaggggacgcatgtggcgcacccccggttctcgtggcgacgacgataaatcaggggcgttgcggtgacatcggtgggtgtcgcctccacaatgaggcatccatgggacatggcgttggtgcccctggccgccccatcctcagcatgcaaaagtctcggatgtgtcgctcctccatgctctcgtcgccctggattcctctgcgagatcgagctccacctccttatgaatcatctaggcctcttagtggtgttttggtaattaatgacaacctcttgtggactaataattcttggagaaataagaatgcaggttggaccatagaaaacagaaaaagtcttggagacttataagcattggttgtggatcaagtgaagacaaagatataacatgtgttttgtttttgccggacatcagaatttcagagaaaaattgaccgaattagtaggctagatagtcgtactattaagaggggtcaattgctttggtcggtgtaaaacttagtgcctcatagagcatctagagttaaaatcttttctaaagcgtgtttagaaaacggctaagttttggggtcggcggaccatccggactgtacgcgatctatccagagggatccgtagtttcacatgtctttgtggccttgtgcggaccgtctggccagggtcagcggaccgtctgcaagtgccaaaatggatttgggcaggcactccgtgttttggggcttttgtactatggaacgtcggaggctttagcccggacagtactaaatcctagggcctgttggacgaacagttcgcccatgagctttgacacgattcaagttgtcaggtcccggatcgtccgatctcggcgtgggtggtgcagctgcgcccaatgccgatgatcttcgtggtcgccgcgaggagactctgcgccaccgcaaccgccatggtcggcgggggttgctggagtggaactggaactgggcacaggcgggacattccagactttagcgtgggaacttgacaggccaactgtaatcttggctctctctcagcatggcgcatgggctgaccctgaaagaaaggagtctccaattttactgggctctcttcggtttttgggtccactgcttccaaggcccagcatctgacagtcgcatgccatgacgcacaaaacccacggcggcacggccccattccgcgtccacactctctatataaagtgttccctcactccactccaagccctagccgcatcccttctttcattcgccgccgccgcctgctctctgctgccgtcgcc

SEQ ID NO: 336 - DNA, 1947 bp, Zea mays
  source 1..1947: mol_type = unassigned DNA
accgctgccttcatgcagtcacttgtgataatagcaattttgaatctgtggtttagccaatcgatttgttccattgtctagcagtcccattgggttgttccttatttcactgaactcacttatcaaatggatgaggctagccctatcatattgtagctaacgtagccatattcatatttcacactaaatgggtatggctggttttcaaatttcttctttttttaaccatgtcactgttactggtaattctggtacataaaaagaaccattactagtaatttgttcctttttagtgcatgttgctgataagctgagatttccatatacacttgaattggctaatggacataacacctttcagttttttgctcaaaaggttttttgtgtgtcaaggttaccaacttaccatgaacagtatctgaaatcttccaccattagctctattcacattctccatgtttgtattgaaacatcattgggtaacagctatatgctgttatagaatagtatctttttttaacttcataatttatatatggagaaggcagccttctgataataagacttgctcccttgccactattgtcgttaagatcctctgttccagaacatgaatagcaactgcctggctggaagttgtgtcatatgcatgatgcatcttcccttaaagcctttcctggttgttaaggttgtcgtgaagcaccacactgattactgatgtcctcattcaccttcacttacaagttaaaaccaggccttgaagtctgtgttgttgataatacgatctcattttacttgtaagatgccctctagataatctatcattctgatggcaaatgatgacagtcatcagtaaccatatcaaatatataggagtttctaaactgcagttataattgatttggtctcatactgctgctgccttcaaaagtcccatcgtttgtttagttttccgacctctccaccgttaccttcaattgaaacaagacattcatgtcctatgactgatcccttgacatttactctgatcccttgacatttactctgatcccttgacataacactagttaattaccaacggcggaaattgtggggatcagcatggttaatttttggttcattgttgcaattgcgggcacttaacatgcattacctatttcaaacttcattctacaaaaacaatggcatctaaagtgttgcatctcctattttatgtgattcatcaaagacggcccaacaatttgtagcgaagggatatgttttttagtagtttaattgtatggcgatcgaacgagatgcttttttaccgacttattgatgtcaaagaagtgtcgacttagtttcgtcttcgagcctaagcgagctcgagccgactggcgagcctcgcgttttcttcctttccccatttcgattttttgttccaaaccagcgccgtcagaactgaaataaacacgtgctgatacgaggcatatcagctgagaaataataatgtttgatcgacatttttttttgcaagttctggttcaaaaaaaaacatttccaaaccatatcagataataacaagtacttctacaagcctgtaagcagaaccaagacaatttctaatgttttattttatacaacacaaacacagaaagcaaaagaaagattttcgggaaaaaaaacacagaagaaagaaattccatcacagaaggcttcagatgacgcatactgggccgtaacgtcccgagcgcaagggcgtagcccaaccaacggcccatatctaaacggcgcagccccagcggaaaccctcagcgtcgccgttcagtataaagtagcgcccccaaaccctaccggcacctctctgctaacgccgctcgcgcatcctattgccctcgcgccaccgtcgccgccgctgcagcgagccaccgccctgccgtcgcctgaggtagacaccaagccaccgcc

SEQ ID NO: 337 - DNA, 1058 bp, Zea mays
  source 1..1058: mol_type = unassigned DNA
ctaaatttaagaccgataggattggatttttgacttgttgatcttttagaaaaaaggggttctgttggaggtgttttttaagagattgccctatatttcaaaatatcaatatatttagaacttctattggagttactctaatcgtatcagctgcacttgcgtacaggctaccggcgtcctcagccacgtaagaaaaggcccaataaaggcccaactacaaccagcggatatatatactggagcctggcgagatcaccctaacccctcacactcccatccagccgccaccaggtgcagagtctttcgtcatctcttctccggcgaagaacccccagtcgcccaccaggtattggcaccctctttctcttccatgtctactgtgtgaaatcgagttccgaatctctaacctcgagctatttggctatttgatgcgtactaatttctactccgttttctagatccggccctgggtactagtgtttcgagatagcatctaatctgaattttttcgttagctgttagttatccgttctattgtgcagcaataccgatatgcagatttagctcgtagctctttatgttcctccgttgctgtcataacggttataattgcgattatatggcgagctttacaatcttagttattatgatactctgtctggtcgaatctactattaagtagaacatatggttttacaattctatgatctgtgatcctattattgtcctattagggctctgatcccaactcagtatcatgatttcaagaaatttggttgatgggatatgttttttctgtgcccataagttgttactcaagctttgaattaagctatgacatttcagaaacatagatttggtttggattttggttcagggtgcttgttagatgtaatatctgcatagttgtttaaggattatgctcacagtaacagtagcagcattttttctctgttcattgaacgtctgtgtaactgttgtcacgagttgacatttcaagttctaacactgctctcatatgtgccatcagatcacttgttaaactttgttgaggggtg

SEQ ID NO: 338 - DNA, 10000 bp, Zea mays
  source 1..10000: mol_type = unassigned DNA
ccaaccagagtcaaattctgatgactggagggaaccaatcatcagatatataaagaatgaggaggagccggatgacaaaaatgcagcagagcgcattgcgaggcagtcagctcactatactctcattggggaaacactatacagaaggggcacgacaggagtcttcatgaaatgcattctttcggctactgggaagcaactgctagatgaggtccatgctgggcaatgcgggatacacgcagcatccaggactctagttgggaaggtcttcaggtctggtttctactagccaatggcaaaaagttacgcagccgagttagtccagagatgtgaagcttgtcaatacttatcaaaacaacagcatctaccagcacagcaactgcaaaccatacttgtgacatggccattcacgtgctggggactggatatgattggacccttcaagaaagctcaaggatgatacactcatgtactggttgctattgacaaattcactaagtggatagagtacaagcccattgcttctctaacttcagctaaagcagtggaattcatacaagacataatattcaggttcggaataccgaatagcatcataactgacctgggatccaatttcactagttcagagttctttgatttctgtgaacaaaaaagcatccagatcaaatatgcatcagtgacacacccaagagccaacgggcaggtagaaagagccaacgaaatgatattggaagcactcagaaagaaagtcttcgacaagaatgaaaagtttgcaggaaagtggatcagagagttggcatatgtggtctggagcctgagaactcaacctagccgagctttgcatggaaacactcccttctttatggtctatgattcagaggtagtactacctgctgatctcaagtttggggcaccaagattgatcttcgaaaacatagctgaagctgaggccactagactagaggatgttgatatactggaagaagaacgattgaatatagtgattcagtcagccaagtaccagcaaactctgaggcgctatcatgataaggccatatggcatcgatccttcacagtgggagatcttgtcctccgctgaattctaacgggggagggacgacacaaattatcgccactatgggaaggaccattcatagtagcagaagtcactcggcctggatcatatcgtcttactcaaatggatggcacagaaatagggaactcatggaatatagagcatcttaggaagttttacccctagctagaattcaaaagctattgggatggtactgtattctgtaattggataatgcaccatcaataaaaagtcttcattctcaaaggcactcgaactgtttattgtcaatctacatgcttactcgactcagggtgaccactataccctactaatggagcaatcgacttaagttggcgacaacttaaggcggtgtgacacgctcacgcttactcaactcagggtgaccactatgccctactaacggagcaatcgacttaagtcgatgacgacttaaggcggtgtgacatgctcacgcttacttaactcagggtgaccactatgccctactaacggagcaatcggcttaagtcggcgatgacttaagacggtgtgacatgctcatgcttacttaattcagggtgaccactataccctactaacagagcaatcgacttaagtcggcgatgacttaaggcagtgtgacatgctcacgcttacttaacccagggtgaccactagacccaactaacggggcagtcggtttaagtcagaagtgacttaaatcggcgcgacatgctcacgtctactcgatctagcataagcacgcttgcgattactcgtcttagggcgatctctacgcctcgcgaaatagaaagaagtttcaaaaccatcacattgcacttacttctgcaaacgtaacaactgttgaattcaaacaacagaaaaataataataacatttagtaccaagaatactttctaacagaatattcgagcacattgaccacatacacaatgcattcagtgtttctacttggtaatgtttttctcaggagcaactgatgaggaagagctactcgaagaatcaggagcaacgttgacatcaacaattatgtcgtcaggaacaatcacacccgaccttctcatcaagatccgccccgcgcgaatggctttgtccatagccttgtcacgctgagccttcaaagtagtggaagtgtcttcagcagccttgacagccagccgagcagcttctagctcctggacgactaatcttttggaagcgcgtagatccttgatgacaaaatctttgcttgacaccaattgcctaagacgaaggatttcatcctgggactcttgcagcttgtgacggtgattatccaagtttgtcatggtaaagcgatggctcctctctaagatagtcaaaaaattgttggcgtcacgatacaacctatcaaggttatcgcgagaagctgcaagggcacattttcttcctacagacaagaatcagctctcaaacacccagcgggcagcaagaacacagcagagaaagtcaaaataaacttacttcattagtcacccttttagagtcaagctgagcactgagagaggaattcaataagttggcatcatctaaagaagcagaaacttgagccaggtttatctgaccctgagagtacttctccttgagctcagagtaccaccggaccatatctagaaagaaatggttgaagaaatatattcagtaaaaagcagattaatcaaatagccaaagaggaaacagaggcactaaccagcatttgtcacctccaaatcagatacctgccgctgaagcagcattggattccaatgcgtcagagacagagctctttctgggacagaggcaccctgtgatctcagctgaccagccatctcgtcaaccaaagcctgatattgaaaacgaatgagtgcaaagacagtatttcgcccggagtatagccagatcgggaaaaaaagccaaattacctgaagattggagaagaatgaaggaagccccaaatcatgagaagccagttggtgactcgacgaaggaatatcaatcgaagcaatctgaaaagcatcattggggatcaactcaacatcaccagcaggaatcaaaactctagcgtcaggtgcgtcggtctctaaggtgacttcctgatttgaagcacgtgttgctgccatataatcagaatgtggaggagaagacccgacgtggacatccatggaggtatgagaaggggagcccgctcggacaccctcgggggctgggtcgtagcccacattgcccatcggagccggatcaccaccgacagcaccctcgggggctgggttgtagctcgcgctgcccagtcgagccggatcattatcggcaacaccctcgggggctgggtaaccgctagcaccatccttggggaccgggttctctgcagcagccacctctaaggctaaaggattctcagtcacctccatgggaatggagcaacctagaccagcttcttgattctgaaaaccacactccaaggtcgacgaggcacgagacgctgctcgggataactctaaccccacatccggaatgttagtgcaaacgtccatcatgccaccatctgttggctcgtatagcagatcttcaggaaccatatcctcgagagcctgatcaaaatttgctatggacaactcttgcagaccaacaagagcagacaaagctggagaaggaacatcactactctccccactgactaggtagcgccgactgtttttccgaattaaggggatttcctcatcttcttcctcatcctcgtcaacaatacgaacaacacacccattggggtcagctctggccggattgcacccattggggtcagctctagctggattgcacccattggggtcagctctggctggattgcatctagtgggttcagcatcatcgaggtcacacccattggggttagcgtcagcagggtcacacccattgggatcagctccagtaaaaagttccactggtacttcttcagcagcaggaacagaagggccgacatcctgattcaaacatgacactcgccgaagcctcctctttttcttcttcttcccctcgacaggagcagttgagtgactggccgggcgaaggcgctttgggtgagcaccatcagatttttgagcattcaaggttttttcgggctctgggataatcgcaatagctatggtttcagtagggacagagtcagaagaatcctcagccaacatgtccagcatagcacttatctctgcatcgcttgggtttataggcatctcaaagtgaacttgtctctcatcattggggagatcaccaagtgaagcaaccagagcctcaacttcttcgggagagggtcgcactctaagacccaagccattgtcactagcaggaggattggacacaaaattgaaaaaagtcttggaaggtggcagattccaggcagaatatgcaacaggagcaccaatattcgacactttgcctctgaggatcatctccagccggcttaccaaatccacaacaggaatcctcttgttggtaactcgggttgagtcagtgacaccactatacaaataagccgggtacgctctgtccttcagtgactgaatgttcttaaaaacaaagtctgcaactacagcttcagcagtcagacctctctccttcaacaaaccaatttcggcaagcagaaccctggcctatgttatctccaagtctgtgggggattcagtccaacttggagcacaaacatctgactgtctccctgaccgagggggagggacttgccatgattctctacaataaaccactccaagcgccatcctttgatgctgtccttgagtgggatgtcgaggtactatcttcctcccacgatgcatctccaaactcacaccacccacgagctggtgctgcccccggccattctaggccgacaatgatataagtacttccacaagccaaaatgcggcagaattctgaggtaggcttcacacaagtgaacaaaaacagaaacttgcagaatagagttgagattcagatgagtcagattcagatggtagaaatcaaggagaccatgaaagaaaggagaaataggaagagcaaggccgcagatgagaaaaggaatgtaaataacagactcgtgggtatcctccgttgggacagtaaccccacgacagatctgccaagagcaaagctcctttggaggaagaactccgacggagacaagatggagaaggtccgactcagaaacaacagacatatgattacctgtgaaaggtaattggctgttgggatcgatgggaggaataatcgcagcggtggaattctgactcttcgcttgggcgccatctcaatctcgtcggcgaactgggcagaagcgagatcacagggaaacagagaaggtctagaagcagaaagtaaggctagggctcagaatacagaggcatgcgacgacgcggtacaaatggggttttcccgggtcagacaccgattctaaaagtgccagtcatcacttgattgttacttctaaaatgccgacgtggctcaatgtaactcaaccgttatttctaaaacactgacgtcatcggtcttcactcagttgttacttctaaaacgccgatgtggctcaatgtaactcagccgttatttctaaaacgctgacgtcaccggccttcactcggctgttacttctaaaacgccgacgtggctcaatgtaacttagtcgttatttctaaaacgcggacgtcaccggtctttactcgactgttacctctaaaacaccagcgtcgcaaaaaccattcagctattacctctgaagatactgacagtaaatcagccattttttctctaagaatatgtaggcggacttaaaaatgcgactaaacaattccaagttgttacttgagcattacctctgagaagaacggctacattaagcacaagtacaatcgatcgaccgactgcaaaaggaacgacagaaaaacaagaaatgcacacagaacaagctgaagtcttcttcattatataaggaggggaagtattttcacaaacttaaaaaccaactcattatgagttggtcttcttcccactattcgatacattacactactacattacatttcactacactatactactaactactactatattattctactaatactacttctactgctatttatgtatactaacatctaagccagtggcacttagccactggccttgccgctgccgctgccgcccttgctatcgcccttgccgccgcccttactgccgtcaccatcaccgtcgcccccgtcgtcgccgtcgccctcgccgtcgtcgtcaccgtcgttcccctcctcggacgagtcagaggagttcccctcgtccgaggagacctccgactcatccgagccctcgagcccagcaagctcgacggcccggatgtatgtccacacttctgcagcaatcccctgggaatcgtctgagtcgtcagacgatgccgggggaggggcatggaccggcgatccctcgaactcagaggagaactcctcctccgagtactcggaatcgccgaagtcctccgagggaggagtcggctcacgcttccgcttgtcgccggagtggtgcgaggagctttcgcctttcttgctcttgcccatggtggagtagaagagaagagagtaagcagcaagcggcagagagatgtgtgaagacaccagtgaaacaagcgctctatttatagaagaagaaggcaaccgctcatctcctaccacggtcactgaacaatcacaaatattcaataagcaatccaaatcgtctgcaaacaagtcagacggctgtcgccgtttcacgtaacacgacacccattgagactcaagtcaactgcttggacggtatgattacacccgcggtcacgtcaagttaactactcaggggcagtttgctaaacgctcagcgcaccaagtcgtcccttgctcacacccattggggggacgtccaggaattttcaatatattttcccaagcagtcacatccacacagtatacataatgaatgtatcaagacagaagaaatatatcgatggagatcgaaggaaagccaaaaatagatgatgaagtacaagtctaatcaacagaagcattgaagcgcgaagtgatatgaagactagccaagagccatctaccagatgtccaatctgtcgcagatcaaataaatttcaaacctaacaggacatgggcagatcgcacgctcgatctcaaaggcaagactgtacgctaacctctaaagcataaagttgatgatataatgctgatctctaaggcattcgacgaagaggaaaggatgatttctaaaaacagcatgagatgaagacctttgaatggattattttcagtaatccactcaaagctcgggggctacacccattgggtgcacctccgatgcacccaatagatcatcaaccccaaaagacaaaatgctgatttctaaagcatgaaataaaaataaaacaatgctaacttctaaagcatgagttctaaaaagacttgagatgaagaccttcgagtgggttattttcagtaatccactcgaagctcggggctacacccaatgaatcctaaattccagaaagcagaatgctgatctctaaagcataaacctgagacagagcaccgatttctgaggaataaagcgaagaccgatgaataatggcagaagaaaacaacagaagatcgtttttaccaagtcactcagagttcagaaacaatggcttggcggacctattttcaatgcattccttatcaaaatcaaaaaccgcaagctgaacctaggatctttgggccggttatttctaaatcaacccaaagatcgggggcttgtgggggacagatatcccccgggtccactggaaggctaaaagaccccacgaaaggccttgggcccaatagttcgtaaggtcattccttcgtgggcctggggagggacgtccagtgaagtggattgacacaagattggatcaacgcaagcctagacggcctaatgaatttgagcagcaatcgcgacaatgatccgaccttctcgtacaatgtcctcatacatcgaaactgaacggagataggtcggcagaattataggaagataggctcagtcggttcactattacttaggctcacgctgttatcatatccgcatgtaacgccccacggtcgagtatataaggcctagggggcatccccctcaaaaagatatatctcacaacttagccagccactcagttctctaacatcctcgatactagagaactccctttgtaacccatcacacaaagtatccacgccaggacgtagggtattacgcacctcgaagcggcccgaacctgtacaaaattgtccacggtctctcgtgcatctggcacgaaccatcgagctacagtcggtaacaccgtcctaccccaaaaagcacctcgagggacaaccctgggtgcgcgatcggacccaaaacaccgacaacacgtctatagatggccaaacagcggcccggcacgggccagacacccgcgggccataacactggtccaggcacgtcatgttggcctgctggctgtgccgggccagccctttagcccgtcggaccatttgattaaatcaacgtaaaatttaaaaaagggtggaggatgtggggtttgaactcattgctctgatgtaagaagggcgggagacactgggtaaagctgtctaaccagtagaacatcatgtttatatgtttttaatatgtatatatatgtatatatgttttttataaaataaaaaatatataatcgtcttaggccggatcagcactacggaccgaggctacagcccaagcacgtcacgacgttcttggctcttgcaagcatgaagtcgtttctgagaccacattggcgcaatggactctatggtgtttgaggttgctaaattggatggggcaacaattatttgccacaataacaggaaatgaaatgttatttgttgattttaagcgttagtaattgctacgaagtagcataatttatatagagcgcatccatattttattgatgcctgaatttagcaatcactctatattttgatttatcctttttataagtttgagttcatgtgacttattttagaaacttgagctcacaaacttttcttatttggtctatgtatggtagaattatgtcattttataatctctattcgttcagtagtcgctgtgaactcttttctagtcgctcacttcattgaccgtgttgtaccaagatatattgaatggagtaaataataacatcagttagccaaatcaaaaaatatattatacggagagcggagacaatcaataaaaaatattgaaatatttttactggatagtttatataggtattgttataagccgtttgcaacgcacgggcaatcgactagtattatttaacgtgtgtgctttgtttctttaatgtcattttgtcatttttttttctcatgcgatgaacacgaagatgacaattcgcaaaacaaaatgattacgattcttaaacctttagtcggccggggcatggcatggcatgtcaaaagcaaaacaaaatggcttatggaaaactggaagtgcctagtcagtccaacccaaagagcgatgacgacgcagggaacaaagcccacgacaaggcccaatacggcccaaacttctgccactggcaaagccctaccaacccaagcacctatattatgtccacccacgccgcctccctccgaaaccctagaagcctccaccctccagcgcctccaccttcctcgccgcctcactccctctggtacgtgccgtcggctccacctctggctcgcgcccttgcttgccgccgctgccgccgcgattggcgcctaacctcggtgtcgtgtttttcttttcttagcagaggtcgcagatccgtccggttagacgaagccgcccgcaccc

SEQ ID NO: 339 - DNA, 10000 bp, Zea mays
  source 1..10000: mol_type = unassigned DNA
ccccgcggggatcggggacggggaataggataccatacccgtccccgccagacccgatggggatagtttttctcccatttaattccccgtggggagcaaattgcaaccatccccatcccctaatgagtgaattccccgcggggaatcggggaacggggccccgttgccatctctatctccaacgatgcatatccgtcgtcgaaggacaggagctattgcaagagatacactcgggggcttgcggtcaccatgcagcacctcgagccctcgttgggaacgccttccgacaaggcttctactggtcgaccacggtggccgacgccactaggattatgcgctcttgccaagggtgtcaattctatgcaagacagacgcacctgcccgctcaagccctgcagacaatacccatcacctagctgtttgttgtgtggggtctggacctcattggtcccttgcagaaggcacccgggggcttctcgcacctgctagtcgccatcgacaaattctccaagtggatcgaggtccgacccctaacaagcatcaggtccgagcaggcagtggcgttcttcaccaacatcatccatcgttttggggtcccaaactccatcatcaccgacaatggcacccagttcactgggaagaagttcctggacttctgcgaggaccaccacatccgtgtggactgggccgccgtagctcaccccatgacgaatgggcaggtggagcgtgccaacagtatgcttctgcagggacttaaaccgaggatctacaacgacctcaacaagttcggcaagcggtggatgaaggaactaccctcggtggtctggagtctgaggacgatgccaagccgagccacgggtttctcaccgttctttctagtctatggggccaaggctatcctgcccacagacttagaatatggttccctgaggacaaaggcgtacgacgaccgaagcaaccagaccagccgagaagactcactggaccagctggaagaggctcgggacgtggccttgctacactcgacgcggtatcagcagtccctgtgacactaccacgcccgaggggttcggccccgaggtttctaggtgggagacttggtacttcggctgcgccaagacgctcgagggcgccacaagcttactcctccctgggaagggtcgttcaccatcgccaagattttgaagcccggaacatacaagctggccaacgatcaaggcgaggtctacggtaacgcttggaacatccaacaactacatcgcttttacccttaagatgtttcaagtcgttcatacacctcgttctcttttcatacataaataaagtctaaccgtcaaggaagggtcagccttgcctcggcaaagcccgaccctccctcgggggctagaaggggggaaccccctctgcgtcaaaattttcctcggaaaaagtctttctgccagaacgtctttcgcgcttttcgactgctttgatagcgggatcctgaaaacgacgagagtacacgtaagcggcaaggccgaccgagccgagggactcctacgcctccgggatacggatacctcactcatcaccttccgcgataagtaactcatgctcggataagtgattctgctaccaaacaagtcctaacgctcgaaaacttttcttctagaacgattttcgtgccttctcgactatatcgataacagaatcctgcagacgagcaagagtacacgtaagcggcaaggccgaccgagccgagggactcctacgcctctgggatacggatacctcactcatcaccttccgcaaaaagtaactctcgctctgataagcgattctgctaccgacgaacaagtcctgatactcgaaacaagaggaaaggaaacacagctttataacacgacaataagatgtttgggcctcggcggtcgcaacaagcatacgcatactacagacaaactgttcctgtaggttcagacatcgacagagggagcagcagcaccctcggcgtcgtttccaccttcggcggaatctggcccggcctcagacggcgacacgggcggaaggatctccacctcgaaggaggaagccagcaccacgcttgggccatcgcagccagagtctctacaagggttccggcccgagcggacgcctcggctggccgctccgtagcctcagccagctatcccccgagggcctcagcccggctcacggcctcggcagcgtgactccggggttggtcccgttcgcggatgacctagccaagctccaaccgccgccgctgcacctcctcggcctaggaagccacctgctcctaggccgacaaagactcttttcgagtcgactccgcctctgtccatgctgacaccgctgcctccggctccagctcattgcagagcagccgagggttcttaaactgagcaagagaagccttgagtggtaaggtcgaccgagccgagggactcctacgcctcggggatacggatacctcactcgtcaccttccgcacagggcaactcacactcggttaagcggttcagctagccgacaggcgagtcctagtgctcaaaatgaggaagaaacacggtattacgctcaaatacccagatgttcaggctttgacagccacaatgaacaaacaccggcactcaaggtgccattacaaacagaactccggttccactcccgcgggtatgaactacctccacaccagagggcctgcaggacgacaagctccgggtggctcgccggcgaccgctgcaccaacagcgaggcaacgacctccgtctcggacgacaagacaacagcagcgatggccccagggcgaacgttaccgttggaaggccctcgttcacgtcccctcgcgggggacgagaaccagccattaaagccaaagagccggaggcccggagcgcaggtggcactgacggtgctgtcggtggagaaaccttctccggctgccaccacctcagcaccgacgacagcggccacctgcccaccaacaccgcaccagcgagcggcggccgccccaaagcgcaccggtaggtcctcactcccgttctcgccacgagaacgagaatgggaccgtcccaaaacacgagtactgccccttgtggcgtacgacgtgttgtgtgaccccccagtgcagccggccatagtcgctcgggcggaggacggaatgttgcaccctggccaggcagcagcagttcgccttcccccgcatggctggaggacgcctcctccgcagagctggaggatgtcttcctcccccggatgccggaggaagaagcgggtcgccgacccgcgcggagacaggccccggctcgccccgccctccttcccgccacggatgatgaagatccttgaagtgagggcggggcagaggtcgcagcccggcttgcttctccccaccatctaactggtggtcaccatcctaggtgaccattagtgagggaatgcggccgggctgcctgatgaaaatccttgaagccgagcgatggctgaagggtgccaacccccgcgaggtcgtgctccttcaacagcagcaagacgaaggcaacgcgggtgctccccatccgggggctcggaaggtggaagggcgcgatacatgaggggagtgcgaaggcatggctaccgctcgggggatcgacccctttttaaaggcggctctccacactcacgtcctcaggcgttacggacaaagtcttcaccaacgtgctccagggtcctccctctacgacacgggggctaggtcccacacgtcatgcaagctgacccaaaacggaggaagccaaaccgccgcgcgcggagcatgtaaccgccccgtggttacaagcactcctccgtcctcgccgaaaccagcggtcgaaagggcggactgccatgcaggtggcatgcaaccgcaccgtgggggtgcaccccttcggcttcgtcgcatccagcatggaggcccaggcccacacatcatgtaaccggcgcgtcggttactacgtgcaagaaactgcaccgccacttgcgccaatgtcgcgccttctcgactgcggaaccagtgccgcgactcgaggcaaccctgcgcatggccctacagtgccaatcgagcacatcgatcacaggtcagtcagtcgtgggaggaggcgcaacggtcgatatggccaaaagtggaccggtagtaatggcggcagcagacgggcagaagtagcggtcaaatcgcctgcagactcgtgtcccctcctgaagcagcaagggaaccctccccacggcgtgaagacaacacgcccgtgttccgtccttcgaacggcacgcgcacgcggccaccccgcgaaccacccgtcccgtcgcattaactcctcggcagggcaagcgacacctttggcaggcgaagcgaacgtcgtttcacctctgccatgatgaccgcgtcaaaaaaaggtgtgccccaccatttaaattcatatccttttcctcttcccctttctctctcttgctacagggaccgggaaaggggatatttcgaaagggatccttctccgcgaaggaagcgggccccgagcccccctactgatcaggggttcgaaggttggcccctcggaagggtttcgacaactgccccagagcactcggacttcaagctcattactgatcaggggttcgaaggctggcccctcgaaagggttcgacagccgccccagagcactcgggctccgcgtccactactgatcaggggttcgaaggctggcccctcggaagggttcgacagccacctcagagcacgcagagcgagggatgactctagatacgtccattacatggccgaggctcgggctacactcccgaggtaccctaggacatttctgagaccagcaggagcgattttgtaacggaatcccatcagagggaggcatcgagccctcggaccctatcgaacgggaccgggtccggcaaatcacatgcaggtacttttggagcgcgcctctaggccactagccgacccttatcgaatggggcacatgcgttcactcggatcacccgttagcaactcactggagacaccatgttcgacgccctccgagggcaacatggcgcttccccccttcctccttgtggaaaggcgacgaaggggcatataataaaagtcgagacagtccttgatcgtcctctcgctccgtgcagaggctcgggggctgctctcgcaaaacccggctacgcccaaaccgttgacagcgtcaacaaaccagcctaaaaacttggaactcgaccatgcacccgggctacgatcaggtcgcatgagggaacaaccaggtcggccaaggcatcacgaaaggcattaagacctcagaggagtcaaaccactccttcgaggcctcgggggctacacccggcgggtgcgctcgcgcgcacccaccgaaataaagtgcaaccgagaaaggccggtccccttgcaaaaaagtgcgacaaagcctccaagcgagtaccaacactcccttagaggctcgggggctactgtcgggtaccgtaattaggggtacccccaacactcctaaacacgaccggtaacccccatcagcacaagttacagagactgatgggcacgattcaggtcaaggctccgtctactcaagggacgtgatctcgcctcgcccgagcccagcctcgggcgggaacagtagtcccagatgaattcacacctcgcccgagggcctcctcaagcaacaggcgcaccctcgactcgcccgaaccccagctcgggcgggcttcgttgtgaagcaaccttggccaaatcacctcaccaaccgatcgtatcgcaggcgcattcaatgcgagggtcgcctgataccttatcctgacacacgagcctcagtcggcaaggtcgaagtgaccgcagtcactttgccctttcactgaccgacctgacaggaaaacagcgccactcgccccgctccgactgctgtgccacccgctagggcgaagctgacaacagtcaagtttagcctcaggcgcaacaggaatctccgcctcgcccgacccctggggctcggcttcaacctcggcctcggagggtggtctccgcctcgcccgacattgggcctcggcctcaagaggaggtctctgccttgcccgacccaagggctcggcccctgcctcggcctcggaaggtggtctccgcctcgcccgaccctagggctcggcctcaacctcgacctcagaaggaatcacgtcctcgcccgaccccagggctcggcctcaacctcgacctcggaaggaattgtgtcctcgcccaaccctggcctcagcctcaggaggagtctccgcctcgcccgaccttgggctcggaccgaccgtgccacagaggatgcatcattaccctacccctagctagctcaggttacgggggaacaagaccggcgtcccatccaggctcgccccggtaacaagtaatgatggatccccacgtgtgtccatgacgacggtggttctcagccccttacagaagtaaggagacgtcagcaaggtcccagcagccccgacagctgtgcttctacagggctcaagcgctccttcgacggccacgataccgcgtacacagggctctagcacctctccgacagccacgttggcatgtacacagggctcaggcacctctctgccggacacgttagcacatagctacacccccattgtacacctggaccctctccttgcatctataaaagggaggtccagggcctccatgcgggagggtcgcgcgggagaatgggttgacgaacaggctcactctctctatcgcgaacgcttgtaacccctactacgagcgcatccccctggcgcaagataacacgagccgtgttttcccctttcgtgttccatctcgcgccaacccatctgggctgggacacgcagcgacaattttactcgtcggtccagggaccccccgtggtcgaaacgtcgacatattccttcaattcaacctcgtgcgaagtaagatttgccatagtagacttatcaagcgcacacactagccttttatgatggttttgtatatcccctacgatacgttgcaactgctctcgttgttcgtcgatgtaagctttaagagattgaagttcgttggtgctacttacattgggggtaatcgtagtaggtcggagcgaagccggatctgtcgcccgttgccgaacgactttgttgttcctgtccaccttgaagtcggccaggaactttgcctttgcttcttggatcagctgctcctggcgctcctcgaacaggagttgttcctcagccggcaaggtttcccatgtcggcgtgatgatattgctggtggaaacttcagagatatcctttgaaccgtccattgagggccgatttgataggtctatatgtgttttccccagcggagtcgccaagaagtatgttgacacctttttagggcgccaatcactcaacacgaaccagcggcggtgctctctgcgcaggggcggacggtccgcggcctggcgcaaggctaaggtttcctgcctgacggctggatggtccgcgccctggggccggacggtccgcgcgtgcgcaggggtggcggaagatcgccggcggcgcctggatctcgctcctaggagggaccccgtcggggaggagagatcctaggagttgtctaggctcgggcaggccgacctagactcctctaatcgacgtagagtcgaagagaagcggagaatttagggattgagaggctaaactagaactagactagaactattcctaagaataaatataaattgtattgattgaaggttcgattgatgattataaatcggccgtatacctctgtatttatagaggaggggggctggacacgttacaaacaaactccccgagctaatcccgcgaatttcgctaacaaacacggcaagaaactcggaaccctaatctgttctgcgcgcgcggaccgtccggcccatagacgcggactgtccggaccgcggaccgtccggccctaggaccgaaccgtccgctagctctttttggtgcccaacagtgattaaagttagctattcctaaggaataaggatagcaccaacaaaaaatgattagttgggctcattgaatcacgtgaaatgtccatcctactacaaatgagaagatgagtcaatcctccatactatccccactttagtttaaccgacccaccctactgcactcctaaccataggaacatgaagcgaaacataccttccgaagcatctcttctgcatttggttgatcctcacgctgcaggctgatgaaataagactggagcttcttcgcagcctccatgaaatccctcgcgtgcctttcaacatcaaccgtgcaactcagtagaaaccgcgacacttaaatatcctgtttggtaggaccgaatgtcaaagtgcaattttacttatctaataaccattgtgcacaatttaagtccgcatataaaaaatgatacaagattcgttctcctcagtctcaggacctaatcaactaatcgctatgcatttgcctgggaacaagaaagatgcaaaatatccctctagaaagaggaaggccccgtcatccatctcggattctcgtaggcaaaacaacgcacacctggcgcgcgacggcgccgtggaccgaacgagcaccacgaggcttggctagtgccgcagcagcgcagagcgaagtagagaggaagagagggaggaaatgatggggggtcggcactccgtactctggtgggaggaccggagggagcggtcgacggcctggagctcgcgcgcgggcaggcacggcagcaggtccgcgcgcccgccctccacgggagtctgctgcgccgatggcgggggcggcgtctgcgctggcgactgcgtcgacgtaggttcagccatgccggagagggtgagtgtccgacggaggtttggaagggcctccgattgcttttgacaaccgttgaatttttttctatgcagtactccttttaatagctctcagcttatttataggtggtattatccttcttactctaacgtctttttaattaggaaaattccaaattactcttaatgttcgcataaacctctaaactaatttttagaacacttaagaagaatggagcgactccatcttattttctggatgtttgattttcaacagaaaaaagagtggagcggttcctagagtttccatatgaaaatttaacataaatagttagaatattcccgctctataaaaacgaccagatgtgagcgcttttccgaatgcgagcgctctgctccctctcatcccctctatactcatatgactctctaaccaaacaaagaacgaagcgtcttcactctattctactttttaaccaaacaaaaaatggagggacttcactctacttgccaaatgcaggataaaacgattgtattctcaaaaactagaatagaatcgctccattctagttgactctccaaccaaacacacccttactcatccactcctttaagttggttcaatttactccttaacaaaatttattttttcttcacgtaaaaaacaagttatttgttcaaatttgttggttagtagctaatagcatattttagagtaactaaaaaaatatattatgattctttataatcattttgataggttagaaatctaataaaataataactttaatggtataaaactaaatataaaatattgataaaaatttctaatatatttttcaaacataaattatgatatccttgaaattcaacttgttatatttattgtgacataactaaactttagtcaaaaggaaccaaacaatataatagaccataaaagtctatctccgtagtccatcaaggcccacgtatgacagcccaatagcccactaattcaaaaccctagcagcaccacccgtcttcctcttcacccacattataaagatcctccacttcgcactttcgccgccgcctctctccttcccgagcaggaggcggacaaggtaagcagcaatcgcaggaaccctagcgccgccgcacccgcagga

SEQ ID NO: 340 - DNA, 5304 bp, Zea mays
  source 1..5304: mol_type = unassigned DNA
aggaaaatcacagaccttgtttcttggtcttggcgtggaccgacacaaataaaacttcattttggtcagatctcagggcccagaaaaatgtagatccattattttcgtggcaggccggacgaaaattgggtaccgggcccacgaaaaataaggtgtatttttcgtccggttccgtaggtcgacgaaaataacttattttatttttcgtgggccgaccgacgaaaatatctaggcccacgaaaaaattaggcgttttcctatagtgtccactgcactccggtattagtgtattttaattccaagttcatacttatgctctcattgtctttttgctcttacttgacatttttggtgaggcaatggggttaaagagccaaaaatgattccgttttggtgcttaatgccaaagggggagaaattaaggccaaaagcaaatggatcagccaaccacttgtgaattttgaaaataatagagtaagattttgcgacttgcccaaaacccttatattgcaaaatttggtcgcttatgggggagaattttgattatgggaaaaagggagaattttctggcacttgatcaattttactcttggaatatctctctatgtgcccaaacaagcgtgtttgacttagagataggaaaatgaatttaatttgcaaaaacaaaccaagtggtggcaaagagtgatccgaatatgccaaatcctaagttaaaagtatttggtcttcaatttgaattgatattacactcctcttgttgctttttgatgtgttggcataaatcaccaaaaaggggggattgaaagggaaatgtgcccttgggccatttgtataattgttttggtgattagatgcccaacaaaaatgttttgaacccttatgtgctaagtgaacaagaagtgcaaatcaaagacaaggtatgtttctagactcagtaaattgtttttaagtactaacatgtttgtccaagtgttagaaacagtgcagagaaaagagaaacgaatatggaaaaggattggctgtgagcagccaacatcagctcgggcctggcacaccggactatccggtgcgccaggctggccgacggtgaaccgactgctctcgggaaaacgacaaaggcgtatggctaaaattcatcggactgcccggtggtgcaccggactgtccggtgagccaacggcgccagtggccaacggtcgaccgtgcgatcaatgcgtgacacgtggcccgtgtcaacggtcggttgggcacaccagactgtccggtgcgccaactggtcccgaggaccaacgatcggatgcgctatatatggaaggggatcacgcaccggactgctacagtgactgtccggtggtgcaccggactgtccggtgcaccactcgacaaaaggcaagattggccttccaagttggcctccaacggctcctagctgtctcggggctataaaagggatccctaggcgcatggagcaagtaactaagcttacaagaaacatcctaaggcacctagactctgcactcacgcattctaatcatagttcttgagatttgagcactttcgagttgtaaactcttcacgctgtgttgtgtactcacctcttcacgtgtgtgcgtgattttgctgcgaacttgagtcttgtgtgcgttgatttccctcccttactcatgtgcttcttggtgatctctattgtaagggcgagagactccaaattgtggagattcctcgcaaccgggaaaaatactctaaaggaaaagattgtggtattcaagttgatcattggatcacttgaaaggggttgagtgcaaccctcgtccattgggacgccacaacgtggaagtaggcaagtgttacttggttgaaccacgagataaaaatcgcgtgtctcatgtgttgcttcttgtgattattttgaccacacgagcgtgtttcatagccacctgatttcactaacaccttgataatcaaatttgtggctatttagtgtttcaatttacaggatcacctattcaccccctctaggtgctctcaataaccaagcaaaaagcactcgtccactttaggagcaaactttgagctcttggattttttgttaagaattaaatatctacaactaaaaacttagaaataatcaaccttaggcttgttggtagtgagaagctcataggccgtcttcttgtagatcttgtggagataaagatggttgattgcatgacacgcgatgttgacagctttggcccaatatgtgtccggtgtattgtaccactgtccttgtgacctcaatgaaagtttggttcttccctctccaaaacaccattttgttgtggagtgtatggaaccgaaaattcatgcttgatgccttcttcacttaggtagtcttcaacacccgagttcttgaactccatttcgtcgtcgcttctcacttttctggatcttcaactcaaactcatttttgagcttgcctcttgaactttctacggagaacaaagtttgaagaagaagaaaaatgatcgatggagaccaaacgaagaatccacctcttaacaagggttcatctttcattttctacatctcatatgtgctttggttgctaatgagaatgatagtgaaagcgaaagtagggatgaggagggacatgaaaatggtagtgatgatgaggatgatcttcaacaattcttcgctcaacaatgcaagatgaacaagatgatcttgcttaaactcatgagaagagcggaagaacaacaagaaatatttcataagcaagaagacatcctcatcaacaagaccaaaatattagataagttgatcaaagaatatgaggagctaaagtgctctcatgatgatttggtccaaaggtatgaagccatgtccattgagcaaaatagaattattaactctttatcatgcattgctcaattagaagatgaaaattatatgctcaagaacacagtagaaaagctaaaaattgataatctagctttgcaagaaaaacatgatatgttgctatgctcacatgaaaagtttataaatgaacatatcatgctagtcattgctcatgaggttgttctcactagtttaaattcatatcaacctcacacatgcacgtgtgttgaaattgaaactatattatcatgtgctaacaaatgttgctcttaagaaagccaatcttccattgagctagaatttttaggaacaagtaatgtttcctatgcaaaagaaaacaatgagctcaagaaagaaaatgagtggctaagaaggagcttaactcatttaaagggaaagtgtcatgctcaaccttttcaagataattgtgatgacatggtgaaaaagcttgtgaatggggcaaccgtagcatgctcaaaacccttcaaaagagtatcaagcttttcaagaaaggcatgagcaaaattcaaggtgagaaaattaatgctcatattatatgctctaacaatgtacctatgtgtttcaacaaagaaagatcagagagaagagataagaggtgctatggatgcaaggagaagtacccataaacaaagaagtaacaagcaaaaggcaaataccttgcaaggacaagcaacatatttgctacatatgtcacaaaagggacacctatgcaaggattgtcccatgaatgggtaccaaaatatgtttgaaagaatttgtaggtacccagagatgatatgaagcttttgggtgcttgagtggtttaactcaatctttatctcaagctatcaatcttacattatctattctttaagattgacccaaagatgaattgaattgatgtatttataacttcatattcatctcgagcaagatcttatgttgtagggaccaaaggatttaccttcatggaaatcaaacaaaagacctataactaagggatatctaaaggacagtaacaattaaatctaaaagtgcacattgctttcaattagtatattcatttgtgtcttacgtaggcacataggaaaaatgaagcacttgaggatgaacttaaaagattctatcttgacttgaaaaagatccaatcacatggtagatctcatattcatcattcttatatgtggcaatccacatgctttaattggtgatgagtatttcttggcatatttcaaattgattcttattaatgccattatctaaacataaagaggattataccaagttcttaaatgaatagagtgctaagtaagaaattcaaattctcaagaacactttttaaaagggaaattctctatataactagagttgtgagactaatgtttctatccaagtgtttatgtagtctcacaacatgagaacgtgtttctcaaatggagtgtgccatttaacgttcaagaagatcaatccaatactatgtgatgtattccttcatgtctaaattggtttagaatcgtccacattaatcactcaccatgctatgaattaaacctgccatgtaaacttaattaaataatcatgctatttcttatcttgtttaaattggtgttatgcatgatatttataagagtaatttagttcatatcaccaccgtggtcgatccctcctcgtcctcatgccccttgtccattccctcaccaccgtggtcgaaggcggcaacaaccatctttgggaggacggggggtgggggtgggggcaagcaggggaggacgggcgttccatgaggtctattcgaaacttggagggctgggaagactgaggggtcccagagccaagcacgtcgtgggttgcggcgccaaggtgggggagcacgggccaaggagacagaccctgaagacgacaacggtgggtgcagggaaatcacgagcgagaggcggggacatggtaatgttagaagtctacactgtacgtacttaataagtagtagagtaaagacataaataaagtttggtttgatacctaacttgtcatactttacctaacttttttttttgcctaagattagtttttcaattcgaacgactaaccttagtcaaagtgtggcatatttagacaccaaccaaacagcccccaagtttgtcccctccccggcttttgcactccccgcaaccaccgtggtagaccgagtccaccgttccaatccctacgccaacgctaaccatcacgaccgtagcttctattcagaagcacggatctcaaagcaagcagcaacaccgccaaaccctaaacaccaaagccccgcatataaataccttcccctcccatcttttcccctctcctgccgccgccgccgctcccgctcccagctcgtgttccgcttcttgcagccgtcgccgcgaagcgctccagagaacttccgtcaac

SEQ ID NO: 341 - DNA, 10000 bp, Zea mays
  source 1..10000: mol_type = unassigned DNA
atggtgggagattaagcggtgtcacaagcactggccacatactgtactgggtactcatgttgccaaatggattgaatccatcggtagctaagactagcctcaggttcctcggatcatttgcaaaacctgggtactttcggtcaaagtccttccacgcttccccgtcagctggatggctcatcacattggcgactggcttcctcactttcttgtgccattgtgtttcctctgaagtttgttttgaagcaaaaattcttttcaaccttggcaacagtggaaaatgcctcaaaaccttatgtggaacccgcttcgaaccagtttcatctttccatctagactccgtgcatactgggcactcattcaatttagcattaacattctgaaacaacacacaattgttcttgcacacatggatgttttcgtatccaatgcccaattctttaagatatttcatggcctcattatatgattttggcaactcactgttagggtatccatcggacatcagcttcatcattgctgaaaatgttgtattgctgattcgataacgagacttcatatacaacatcctcaccataaaagaaaattttgaatggctagaacccagactaagtgccttctttgaatctccaagaactcctgcaaatcttggctcttctccatcagcctctgccgctgcaaacagttcaccgatcatctcaggtactccatgatcatcatcgtaaacatcatcgtccacatccatatgtatcccaaagtcattatcatatccttcgacatcctcctctataccctcaacttctgtatctgctgactccccatgatgaatccacctcgtgtatgtagctgacattccataaatgtgtatatgagtttctacttcactctgaggtcgcaacctttgattaagacaattcacgcacggacaacgaatgtttgtgtcttctgggtatctttcagtaacaaaattcatgaactcttcaactccttttcacatatggcaggtgtgaattgtttcccataaacccatcttctatccatctattttgacaataaattaaaacttgcattaactccataactatgactacattgaaacaaaattgaaaaccacatcaaacacatgcatatatgaaataaaattcaaatgcacatggaaccttattgtcaaaaacacaacacatcaaaccttgtcttttctccccgcccttgccgctgttctgtccacgcccgccgtagctctgcgcaagacgccgctgctttgccgcgcccgaagcttctctgcctcgctgtttgcagacgacgtcgttcttccaacacagttggatcaatggatcaggcgacaagatcgctcgttcgctgcgacgctacccagttgccgatcaagcggacgacgacagacgccggcgtcgttgtgtgccgtaacctgacgggcgatcgcagaagcgcagatcgcagcaggaaaaatcagaacaggcgaacagccatgcagatcgcagaatggcggctgggaaaacctgttaacataacgacagatgggaacacctgttaacagatggatactttctttatatacaagaacaagtgcgtagtctggtggtagcaactatttaaaacaagtcgcaggtccctggttcgaagctccgcgggcacaacttttttttgccaaataactaactgccgcttccagtactgggccgggtccgcgtcgccaggtgggggctgtggcccaaaaaactgcggcccatgtaggccaaggatcccacgccgtcaagtggtgtgtacacgtgggccgttttttactaaaactcatctgtgaccaatttatttcatcattacgtcagccgatcaagccaaattaatctgtgacgttcctttcattttcgtcgacgttcctttcattttcgtctttaatattcaagtctaatcttcgtcccttgtaattgttgacgaagatgtaaatttggtcatagaaatgtatcaatctgtgaccgaagtcaccagcgtcactagaaaatcgtcactgatgatcacatttttactagtgtatattgtctgttatctcaccaatattgtctgtcatcaaatcgtggtgataactcattttgcttagcaagtctatatgcatccaaatctacttcaacatgtaacatgacctcttgcctatataataactcagattctcaaaacgagtaactctagaagcaccatgtctagaaacacaatatgctcatagagcttcggacaaaacctcatgccaacctccttagatcatccttaatttcttttgataagcttgatcaaagtcttgttgctaagcttagcttggccattggattgagcatagtgtgtagatgaattgagaaacttggtcttgtataatttgacaatatctcatacctctttgggtacaaatgatgttccttgatccatagttaatgtttgagggatgtagaatttatgaatgatatgctcaataataaactaaaatatctccttgtgtgttatattcatcaaaggaacaatcgcaatctagctaatgaagtaatctgtagcaaccaagataaagtgatgcccctttaatgatgggggatgaatttggccaatcaagtatagcccccaaccattggatgacacatctaaacatttaaattttcttactgcactattagaaaggaatcaccaaagggctcaacatgttttacctctataaattgcaatatttctaactcaaataaaagagttctatattcggtttgattgttgatgcactagtaatttaatcggcttaacatcccaaattcaaaaccgttaggaaaaataataactatacaaataccttgattttctttacaagccgatccatcgaaataaaacttccattaggtagaagtagagattttgtttccggtttctatagtacaacattgaacaatgattaggagatagcctagatgggtataccccatgcgaagaaatactatcaaagctagactaaccaacttttaaaaccatcctggctgactctaattgttttgagtcaaataaaagcaataacatcgggttttctttgatggagaagttacgcaaaccaacgtcaaagcaagatgtctattaagccgacatgttagccttataactctcgtgccttggcacatgccatatttgaaatttggtaagaataatatcaaggcatgtataaagatagatattgagtggcacacctaaccattgaaattaattatgtggccacttactgcactatagattacaatatttccaagtcaaataaaggagcttcatatttgcttgattattaatacaatagtaatccaatcgctttaacatctctagttcagaaccattaggaggaataataactagcatcgaaataaagctttcatgggatgcatagaagcaaggattttctttccggtttgtacagtacaacaacgttggacaacaattttgctttcgtatatacttgctgcacccgtccacagttctcgtttgagacgccacagggcagaggcggtggaggttggcaggtcaccaccacccggccttgtgtggtgtgcgaagtcttttactgaaactcgtcaaccctaagggcttgttcggttctaccccaatccatatggattgagggggattgagggggtttcaatccctagtaagtcaaaatcccttccaatccgtatcaatccccttcaatccatatggattgtaaataaccgaacaagccctaattgggcatgcactaccggccggcactcaccgcgcatcaacagctcccatgcaagctccagtccagtccctttcgaattttggcttgcccatctcgcccaagttcatcatgcgaccgtgcttccgggaatgcacagtgcagggtgaccctgtgcgggcggcactcgatccgatcgcgccgaactctgcatttcgggaaggaaagcgtttcagaactcctgctgtccatttgacttcgctctgcagagtgacttggctccaacaaacaactaagatgatgaccttccgcttaagttccgagtcagagctgtgaagaacagcattacttttgtcgccgcaatatatagtgtttggatggatggatgaggaatgatgaagagggatggggtgggatcattttaacttgactcatgtttggtttgaaggttcaaagttagggtcaagaaacattcttcaaaaataatggacgaggtcatttctcaaaaaataagggacggggtcaacctaaggttgatcctgttccatccctcgttgacaccgaatcaaacacattagttgcttacatgagtggcttttatctggtaagtctggctctgattaacctgactgagtgcatgtagtctagcgtgtttggttgtatgtatatggccagttttagagatgttgtttggttacttgcattaatacttgttgtataagttaaaaagtgttaaataaacgaaaatctattaatagatattaattatatgttaaaattatttaatacacactaattatatgtttattttgattcttttgaaaaagccgttttcttgaccaaatttaaattttatattttcaaattttaaaccgagacacactgaaaaacggacttgttttcgtttcccagtaacaggaatgggaaattttaccgttttttcggtgaaaaccgagcgagatatccaccactcgtcgggatccaaccaaccaaacaaacacgggtttttggatgagcaagaaaccaaccaaacgcccccatagtaactttatttgtagctagggtattgagaatgcaagatcctacacttgcatgcccgcccgttgttttgcggctgcagaaaattaggcacacggcacagccggggccgtgtggggctgggaccagccgagcagcacacaccaatgcaagagtggtgtgtggcctgactagctgtgtcactggaagctatagcttcttttgttcgttcaatcactggtcatgatggccgggccccggtgatgagttgtctgcctctgccctcgcgcgcacgtgtgaataatgcatggtggtccggccagcggcaccaaatgcatttcagcgtccgcgatggagagaagaaggcgcgcgctgacgccgatcgagcgccgggcggggaggccgcacgcgcgcgcggcgcgtaaaaggccgggtgtggtcgcgtcgtccgatccctccagtactcccgttgatcgggtcactcgggagaagctaacgccatgtgccggatcggactcggcggcggtctggtcaggacatcgacatctcgtcgatcccaccgccggatccgagcgcgcgcgccgccgccacgttgcctgcctctcatgacttgcgaccggaaaggaaagagacgtgcatggcgaatcgaagacctgcgcgcctcgaacgatccgggctggctgggaaaccggccggtttcgacggcgaatccaccggcgcgatgcgcgcccggtgaggcggcggccggcggggacagggacagcgcagtggcagccgttagctttcccgggtggccgtgtgaacgacgctttgctctcgcctgatctgttgtgtaagagtgcgtttggttgcaatgacaggacgagatgggatgggacgatcactcaaattaggttgtttggttctgggttaagggttgggacaggactatcccagtgttatcccctgttgtctctcaaaattggagggacgagagaggacgccaggtgacgtccctgtcctagctgacctgcaaacaaacacatcctaagatcacgctggatcgtcaacacaagctttctactagggatggcatgcagtgatatggtttcggatcacaacgctagagcagaaagttggccatgccgggtctatcgccgactaattttttttttgtgtcagcatgaaagttgtactgacatgtacatgtacgcagagtgtactgtgctctgacataaactcaacttggcagttgtttctagccggggtcctatcatttttaggaccacaagccaacaaatgataggttctctagactatataaaattctttatgatatatataatatacgtttattttacctgcaaaacaaaaaaatacactggtatatttaatttaacatgtctgataattatcgaggaataaagtcaaccaaaataacaatatatttatactttggagctaatatgattaccttaataaagaatagaacttcagtacatccattatttctcataaaaatatacttcttcggcaacatctaagagctaaccagaaaagaagtaattatttcactggagatgaaagtttacgatgttagatgctagataaataaagaaatgaactgctaaaaaatataggagctgcgagcctgccactagagatgacaatgagggtgagaccggcttcgtgcagcattgcaggaggccttcaatcggtgctctagcccgacgtgtgggaccactgcttctgtgcgtttcgacaagacgacaactaacaatatcattgctgttctattatattctattaaactttgggcctatctcctttttggaaccccgaggttcgcctctattgctagggctggccttggttgtttcacggtatgcaagtgacaagtgtggtgcactagacgtgtttgctttctgggctcgcgaggttaggccaggttgacagacacaagaaacccaacattctaaacaatatctgacaaccaatatgacttcgacatagttactgttggaagttaaattgacttccgatagctaatcctaggattgttggaagttaacgtcaggaagacatcgaaagatatcaaatataagagatacaccattgttctcgcagccagttgctcatgtttgtctctcgcacgtcagtcacaagaggtcgatatacatgtatcatcatgtattacatgtttagtctcattgtatattttagatggatttctttagaggccctaattcatgggatgttctttaagatggcttactgtttatctggctctatatttgattaatagcatggataataatggtggtttttggtccgttgtcatgtctttagccatgcacgtagcctgcatcgctctagagtaacaaccgattcaaatatatttagacaactttactctcttcatcgatgacttttaatgcattattattttcattaaatatgataataacctatccagagaagccaatcggcgtaaccaacatagaccgattcacgcgatctagttgaaatttaacatataatttattttcgtgcttctagagtgatctaccaacatgagcacaactttcacttgcaggtcaagccaggtggcatgcctataacctctcatacttagagtcgcaatgggtagtgacgaccgtaacaacaacacactttttaactccacgtgtgccggctcccggacaacttacagtcgtttcctggtcgataatcttccagaatcaaatgtggattattatatagatgtccatagatataatactattgcatgattttaacttcatacgagaaagatatgattattttaagaaatgccttttgaaataaggttttatggaaacaaatatgaacatgagatgcaaaaccaacactcatcgcgggtggtggttattgaggggttgtgtggatatgcattagttggatcatcaagatctaaactaaaaacaaactaaattaacaattagacttagctctagaaaaacgggaaatatgtagaaaattcccaaaacattttaatcgatgtttaaatatgttccaaaaactttccacactaaaaacacaagatgcaaccatcatgtatgtataaacattaaatgtatattatatttttttgatttcatcttatacttttattatagaaagttttagaatgcatgtagacatcaaacatgaagttttgggatatttccagacattagatattttttccctcaagctggtcaacttttttataagcttccaaatttatttttcacgagttataaatattttattttagtttttcttatcctacactatctcttgaattcttctaagattttcataagtttagagatatttttttgtaaattaaaacttcataagctattgagtagattttaactataaaaagatgaaacatgcttgaaaaacatttctaacttggtaggaaaggtaatttgaacaatctagaagttgacagatgagatgacatgttttaaacaagatagttcatagttcatgaaggtgaaagtagaaataacttttttctaggtgtcgtttgattcacatattggtaatgtaatgtgcaacacataatattaaattatgtttgtttaagtccaaccgtaatcgatactacacattaaatggatatcggtttattcaaacttgttatcccatgtattcgagtgtaaataattagcattaccatttacgttacattgcgtgaaccaaacgacaccctaattgcgccctaaaacggctatgggctgattgttaagcctaaagcccacaatgcagtttcgggcccaaaagaggccacttcgccgccagccagctagccagcccaagtgtccaatgcacgaactgatataagaaaccctagcggagccactaacacagtcgcctccttcctgcgccgccgccgccgccgccgccgctaccaccgcctcgcggccgcctgcggctccgcgtttccgcacggaaggtatggcaaccgtcaaaaccttctcactttgtgttcttgccttggactagcttacgcgttcgcgttatctcttgttgtcgctggaaacgtccctaatttcattcccatgttctgatggttttggtcattagatggtttcgttgttgcatctgtaggtgattaggtgtgactgtagtcactgtcatgcaggtaagtacgtccagttgagttttgagttggctgtttgtgtttagctttcccttaccagggacgtatcgaagcaccatactgagtgtctgagacgctatagctgtttcaatcgcgtatattgttttgtgcgtcctatatggattaaggaaccctctttgcagcagagatttgttacgtgttctgctgccagtagtcgcatggcagtttaatctttcgagttctgaaagatgttggtttcttaggtgtttgggagatccttctgaatcgaagcacacgcactcaggtgctatggcctttggcatttcatagttgcctatttaattggtgtgcgagatgcaccaggatagcacccttgcggcagaaactcacttttggttgcttttctgctgcctgtcaaaccctgatatttatttgctgcatatttacttggtttgattgatttccattgattttgcagtttttgtacttatatagttacgtggtcatatggtttctattgcacctgtagctgattagttgtagccagtagccactgtcttgcaagcagatagtcatagggaggtattatgcctttgcgatggctgtgttgcgatttaggattgctttctctgggacggatcagagcacatgtactgtggcgatatatctgttttaatagtgtagttgccaatttttctgtctgtgctatatggacaagggaacccgctttgcggcagagatttgttctgtatttctgctgccagtagtcacccaacagctaaatctttttggtttgagttgctatggcttttgacatttcatatttgcctatttcattgatgtgcgagatgcaccaggatggcaggatagcacccatgcagcaggaaattagttttggttgtgtttcttctgcttttcaaatccttgaatttgtgtcgctgcaaacttataggtttctgctgcctgtcaagtcctggtttttgtgtggaagctagctttctttgttgcttaatatattgttacatgaacagctgcattgtctaatgtacatataatcaattctgatttatttctttggttcttgtaaaatatgtagttggtgaaggtttcttgaggctgagaac

SEQ ID NO: 342 - DNA, 8012 bp, Zea mays
  source 1..8012: mol_type = unassigned DNA
tgcttctagttcttctatgcatcatagaaatttggctaggaaaaatgctatgcctagaagaaatattgttcatgttcctaggaaagtaatgaatgaaccttctacaatttattatgcttgcaatgcttccttttctatttgtagaaaggataagaaggtaattgctaggaaattgggtgccaaatataagggagatgagacttgcatttggatccctaagactattgtaactaaccttataggacccaacatgagttgggtacctaagacccaagcctaaatttgccttgcaagtttatgcatccgggggctcaagctggattatcgacagcggatgcacaaaccacatgacaggggagaagaggatgttctcttcctacgtcaagaacaaggatccctaagattcaatcatattcggtgatgggaaccaaggcaaggtgaaagagttaggaaaaattgctatttcatctgagcactctatttctaatgtgttcttagttgagtcgcttggatataacttgttgtctatgagtcaactgtgtaatatgggatataactgtttattcacaaatgtagatgtgtctgtctttagaagaagtgatggttcactagcgtttaagggtgtactagacggcaaactttatttagttgattttgcaaaagaggaggccggtctagatgcatgcttaattgctaagactagcatgggctggttgtggcatcgccgtttagcacatgtggggatgaagaaccttcacaagcttctaaagggagaacacatgataggtctaactaatgtaactttcgaaaaagatagaccttgtgcagcttgtcaagtaggtaaacaggtgggaagctctcatcatgccaaaaatgtgatgacaacatcaagacccctggagttacttcatatggatctcttcagacccgtcgcttatctaagtataggaggaagtaagtatggtcttgttatagttgatgatttttcccgcttcacttgggtattctttttgcaggataaatctgagacccaagggaccctcaagcgcttcctaaggagagcccaaaacgagtttgagctcaaagtgaagaagataaggagcgacaatgggtccgaattcaagaaccttcaagtagaggagtatcttgaggaggaagaaatcaagcacgagttctccgctccctacacaccacagcaaaatgatgtggtagagaggaagaacaggacgctactagacatggcgaggatgatgcttggtgaattcaagacgcccgaacggttttggacggaagccgtgagcacggcttgccacgccataaaccgggtctgccttcatcgcctcctcaagaagacttcttatgagcttctaactggtaacaaacccaatgtgtcttactttcgtgtatttgggagcaaatgttacattctagtgaagaagggtagaaattctaagtttgctcccaaagctgtagaagggtttttgctaggttatgactcaaatacaaaggcgtatagggtcttcaacaaatcatcgagtttggttgaagtctctagcaacgttgtatttgatgagactaatggctctccaagagagcaagttgttgatcttgatgatgtagatgaagaagacgttccaacggccgcaatgcgcaccatggcgattggagatgtgaggccactggaacaaaaggagcaagatcaaccttcttcctcaacaatggtgcatcccccaactcaagacgatgaacaggttaatcaagaagagacgtataataaagggggagcacaagatgatcatggaatggaggaagaagcgcaaccggcacctccaacccaagttcgaacgacaattcaaaggaatcatcccgtcgaccaaatattgggtgacataagcaagggagtaactactcgttctagattggttaatttttgtgaacattactcttttgtctcttctattgagcctttcagggtagaagaggccttgctagatccggactgggtgttggccatgcaggaggagctcaacaacttcaaaagaaatgaagtttggacactggtgtctcgtcccaaacaaaacgttgtgggaaccaagtgggtgttccgcaacaaacaagacgagcatggggtggtgacaaggaacaaggcacgacttgtggcaaaaggttatgcccaagtcgcaggtttggactttgaggagacttttgctcttgtggctaggctagagtcaattcgcatattgttagcctatgcccactcaccattcttcaggttgttccaaatggatgtgaagagcgctttcctcaacgggccaatcaaggaggaggtgtacatggagcaaccccctggctttgaggatgaacgataccccgaccacgtgtgtaagctctctaaggcgctctatggacttaagcaagccccaagagcatggtatgaatgccttagagactttttaattgctaatgcttttaaggttgggaaaaccgatccaactctatttactaagacttgtgatggtgacctttttgtgtgccaaatttatgttgatgacataatatttggttctactaaccaaaagtcttgtgaagagtttagcagggtgatgactcaaaagtttgagatgtcaatgatgggcgagttaagctacttccttgggttccaagtgaaacaactcaaggatgggaccttcatctcacaaacaaagtacacacaagacttgatcaagcggtttgggatgaagtacgccaagcccgcaaagactccaatgggaaccgacggacacaccgacctcaacaaaggaggtaagtctgttgatcaaaaggcataccggtctatgatagggtctttactttatttatgtgctagtagaccggatatcatgcttagtgtatgcatgtgtgctagatttcaatccgatccaagggagtgtcacctagtggtcgtgaagcgaattcttagatatttagtcgctatgccttgcttcgggatctggtatccaaaggggtctacctttgacttgattggatattcagactccgactatgctggatgtaaggtcaataggaagagtacatcggggacgtgccaattcttaggaaggtccctggtgtcatggagctctaagaaacaaacctccgttgccctatccaccgctgaggccgagtatgttgccgcaggacagtgttgcacgcaactactttggatgaggcaaaccctcatggactttggctacaatttgagcaaagtcccactcctatgtgataatgagagtgctatccgcatggcgaataatcctgttgaacacagccgcacaaagtacattgacatccggcatcactttttgagagaccaccagcaaaagggagatatcgaagtgtttcatgttagcaccgaaaaccagctagccgatatctttaccaagcctctagatgagtcgaccttttgcaagttgcgtagtgagctaaatgtcttagattcgcggaacctggattgatttatagcatacatgtgttttatgccttgatcatgttccttaatgcatattgttgtttatttatggtgctcaagttgtacaagcactccccggacctcacaagtccatttgcaagtgatgcacatatttagggggagatatgctacaacttgaccctttgagactaattgtgtacttgagtttgcttaacttagtctcaaaggaggtttgaaagggaaaaggtggacttggaccatgcaagacttccactgcacttcgatgaaagagtaactcattccaagttcatctatgtactcttattgcctttttactcttggttgaagattttggtgaggcaatggggttaaagggccaaatttgatccccattttggtgcttgatgccaaagggggagaaaataaggccaaagcaagaaatggatcagctaccacttgagaattttgaaaaagtagagttagagtttttgtttatgaaaatactctttgttgtctcttattgtctctttttgtcaaaagttagtctcttgtggggagaatgtttgattatgggaaaaagggggagtttatgaatctaaaagggggagtttatgaatctttgatcaatttctcgtggaatacctctgtttatgtctctacaagtgaatttgacttagagataggaaattgagtttgatttgcaaaaacaaaccaagtggtggcaaagaatgatccatatatgccaaatttgaatcaaaacaatcttgagttcttatttgaattgattttgcacttgttctacttgctttgtgttgtgttggcatgaatcaccaaaaagggggagattgaaagggaaatgtgcccttgggccatttctaagtattttgatgatttagtgtccaacacaagtgcctaagtgttaaaaggtggacaaagtacaaatcaagtataaaggtatgtttctaagacttagtatattgttttggagactaatgtattatgtctaagtgttggaaacagaaaaaaccaagttggaattaaagatggctttgttcagccgaagtcagctcagtctgggtgcaccggactgtccggtggtgcaccagacagtgtccggtggtgcaggctgactcaggcgaacttgctgctctcgggaaatcgttggtgacgtacggctataattcatcggactgtccggtgtgcaccggactgtccggtgagccaacagtcggcccagccaacggtcggccgcgtaatccgcgcgcgacgtgtggcaagagccaacggtcagaaggggcaccggactgtccggtgtgcaccggacagtgtccggtgcgccaacggctaggaatctgcaacggtcggcttcgccaaataaggaaagagatccgcaccggacagtgtccggtggtgcaccggactgtccggtgcgctaggcgacagaaggcaagaattgccttcctggaatgctctcaacggctcctagctgccttggggttataaaagagaccctaggcgcatggaggagaacaccaagcattctctaagcattgctaagcaccaagacttcgattccgcgcatttgattctttgtgatagcaactagagctccatttgagttgtgaactcgtcgggttgtgttgtgagctcttgttgtgacttgtgtgcgtgttggtactctgatttcgtgtcttgtgtgcgttgctcatccctcccttactccgtgcttctttgtgaacatcaaagtgtaagggcgagaggctccaagttgtgaagattcctcgcaagtgggatatagtaaagtgaaagcaaaacaccgtggtattcaagtgggtctttgaaccgcttgaaaggggtttattgcaaccctcgtccattgggacgccacaacgtggagtaggcaagtattggacttggccgaaccacgggataaaccactgtgccatttctgtgttgatctctttgtggttatcgtgttgtgcaagctctcctctctagccacttggcttaattgtgctaactcctaatcaagttttgtgaattaagtttcaagtttttacaggatcacctattcacccccctctaggtgctctcaagcggtccgactaaacaagagtgcgacatagcaatcacatgacacagccaagttagtacgacacaaataatgtgtcgagttgccggggcgcagccaatgctcagccgattaataatgtagtctgatcaacgtgtctgggtacccacaatatcatttaatcgctcgacgtgaggctaaaagctcaacacaacataaatatttagagcgatatgaaaatacgcaacatagccttcacatgcattttaataattttctactaattatttactacgggaaataaatgcagaaatataaacacaaaaattaatgcatgaacataacatattaggtgtaaaatgtattttcccatatttaaacacatatttttctactaattatttgcgactgaaaataattaattaaagtagaaaaatgctcaaactgccatttgcatgagatgctaaccgtttattggttgctgctcttttttctttttagctacacctaatagcatttaatcaggcaggaatgagattgcatgcaggctgtcatgcacacaataactaagggagcagacttcccaccttggtgcgtccgagggctaagtcactgggaccacacgttcaaagccacttaattaggatctctaactaacgcatgcagtcaaagattgcttttctttcagccacaacgtgtgcatgcatgcagtcaaagatccggcttcctctctgtctctgtgatcgccgcatagaccgcatgccaggccgttcactcggcctgcggatggcagccttgcccatccgcctgacgtcatggcggaagcttgcatgcccggcttgcgacggacctcgtttgcgcgcaagcgacagtcggggcaaagctcgctcgtgtggcatgcgtcggttgggacgaagctcgcccatgggtagcctgcagcgtggcattgagttgacctgcgtgtatcgtcgttacacgcagtcacggtgctgctaaagtttggtcgtgtggttcccgacgatcgcgatctgctctggcacaccaataccaaattcaacgtctgcagcaggcacatgcggcggcggccgacatgcacgcagtgcactatgtgtcgactcgagggtgaggcacgacgctgctggcgcggtctctagtggtggcgctagccacaccttgcgggagcaggtagatccattctactaacaaacaaaatcataccacacaatttggttgcgtagaggaatcggagtctatcgtgtaggacagttcggctaggccgtaagacctgccggcttgacagagagttgatgcagatctgatcccgtagcgacatcgaggtagagcgtgctgataacgtgttgaaatacgttactacggatcaccagatccgttcccttccctcccgttagcagattaggcgcgagaagatgtggatgacctgtatcccttcctataagcacaacagatagcacacgagacacatgatgtagggttggacctctgacctctttctcttctctatattataaggtggtatacaggtttattatatagagatgtgagactcctcaggggcaaagcaggtatttacccatataaccccaactaaggttagttgggctttgacatgtatttccccaaagtgcccgcgggcgtgtaactgaaccgaagcacccgttctcccgtttcaaatctatgtgggccggtccatatacagtccagccaacagacggttcacgatccggcgtgcaatcttcgttcagcccactgggagtggagtgactcactcgggtccattctataaaacctctgcccgggggctagggtttcctcccagccgtcatcgtttcgcgtccgcctcagcccgccgcaaggagaggtaaggtaagccgctctcctctcgccccatctctccactgtccggccgttgtggtctcagcattccgaattgtatgtacttctttgttgggtagccggctcggtcggttcgtggaacagccggatctgctctgtaagcgcttgttctggagaggtctttcggcgggagtgagagtcaaggtctcttatatttcgtgtatctgttcgtatcggtagcttttgctgttaatcgtgagaaggttttgtgggagggatctctttgaccttagtacgcccatctcatcgtggtaaggatgctgtctatgatttcaaatattattgccattgttgaattggaaatggcgctggtttactaatggtcttgctatgtttctgattttggctgggttaacgcctaaacttggctttcggttaacgctagaccgagtactgttatttgttaaccggtagcatttatgtagatgacaaaaccattctatggttcactacacaatttgcattattttgtcttgtctcctttgcttcttcacctatctgacattattttctttctttgtatgtttccagttcaggagacatcttcgagaagctgaa

SEQ ID NO: 343 - DNA, 8082 bp, Zea mays
  source 1..8082: mol_type = unassigned DNA
cgctttgctttgtcgcgacgcgagcctgcgcgttgcgttcgtggcgtcggggagggggggggatggcaagcgccggtttgctgtattggtcacgtgatgcggctgcgcaacggccggggccagggcggtgccgccgcggcgacgggatcgcgcgtggttggtgtgacggacgggtgggggcgcaccgagcgcatgccgcctccatgaggattgaggaggccctcccgtccggatgcatcacacatgccactggcttggctggctgggacgtgatcccctgcaccggctacgtgttcttccttctcaccgagaagatgctgacaatgaaaacggcggcctcgtcacggctccgacgcgatccgtgggcgggcgggcgcgtccctcgccggagctggcgccgcgtgtcgccttctctggaacgccacgtgcctgcgtgcgcgcgcgcgcgcgagacgtcctagtccccagtgatttcgcttggaaattttttttatccgaatcttgagggtctggaggagcttcatggctaccgagtgcccgtcagcccgtggtatttttaggtgtgaacggagcccggttctcgtcggatcgccagctttaataagcacgaggtagtaggtgcgaagaggagaacggccttaactaactgctctcctcacgctgccaggaatgagcttgacgacggtgctagctggcacgaccttattaattttttattactatattactagaaaacgattgatcacggcgaaaattaagcactcgcctcatgacccgatcctccgaagccccttcgcatcacggcgctttgcggtgcttgtctttgacttcttcttttttttaaaaaaaaactcgcaatgggtagtacacacgatagccgcagtctttaaaagttgattactcttctcaatctgacctgacgtttggctcaagtcgaactcgagccgggaaaaaataaatatattagttaacaactaaaccctcctgtaaattaagcctaagtacctaggatacgtccctcctgcctctaactacttttttattactatctttattatcgatagaatctagggtgtgtttgtttagcgggttgacgcgggttggaacagattcaacacataacaactcgtgtttggtttaaaaggctcgcgggttagattggttccgggtcgaaatacgtcttgaaaatatgggttctaaggattcctaaaaacaagcgaaccatttcgacccacttcctctctaccctactgtcacccatgtcttatccactcgagaccagcacagggcgtgccgccactgtcgagggaccccgccgacctaccctccgacgttaatcccctgcctgccactagtcgtcggtcccccactggcctacccgccagcatgctggcctccgccagcgccgtcagactccctgaccggcttgttgcgcctcccaccgtcagactcctcggctggcatgccctccgatgtcgtggtgttctccgataggcacaacttgcgagccttgctagtgctgtcgtcgaacaggtaaaggtcagtgctcgtcatcgcctagacaagcctgctagtcatgtcaaatgttaaaaattcactgaaatgtatcttagtgttgttgggatgttcctttaactataactgaaatgtaacagtgagacctcatcactaaaaaattatgacttggttaataatggctttaatttatgtatatattgtgcttattgatttctcaaatattaaaatagtgtcgtttcatttattttgaatgttgtcatcttattgaattgaattgaagatatatcattttgggtaatatgaccagtaaggttactatattaagtttatccctcatcatgaaataaataagagatggtgtagctactatgagttctatgtctatctagtgtccatgccggacatgtttcgttgcatgcttaatagtagcgccgagagcgttccctcctcttctcgcaagcgtgcctgccaactttgaaaaaaaaaatatcttagatatacctttgctctttgctttgagcgcttgtattttgtccttctgtttcttctttaccgagttaagtgcttaactagcatttgtggcaatcaccatcgatcatctgatctatggctgcatctttcttcaatcttggatgtggacttgacctagcccacgcacaacgacacctgcagagtaactgttagcccactaattatctactaccaaacgcaaggttttcaaaatctcccctgtatatacatatatggctttcaatcccgcaaatagatacgttcattcataggagtacgcacgtgtgccgtgcacgagggtctcggtttataccgtcttcttttttttttgaagaagaaaaaaaataaacttgtcctaagcaggacgtacggtagcacctactgccaataagatatatattgctgctggtaaaatattttataatgtttatgatcttatcattgaaaatttcgtgtgaagtttttaaatttaaaattcaaattttataaacggtcttggatgtagaaactattaaaataaaacttttagatctcaaaaagttatgcaactttatagttggtcacattttcaaatgaactcatttagtgccttaaataatcaaattactctcgatttgttatagtacatgggaaatggaaacgtaatataaatataattggtgtaatagtgtagtgctatagaagggtatgcgcgagagagaggttgcgagttcgaatctcaccatttacaaaacatataagtttgattcaaaataatagtgaaaaatgatagggcaacgggtaagggtagggttggagagttgttcctagaatttaaaaaatgttttgctgttttttttttaatttttttgattcttaatttgccgagtgtttttctttgccgagtgctttttgacactcggcaaagtctttgccgagtgtccgaaaaaaacactcggcaaagaaccctttgccgatgaaatctttgtcgagtgttaagcctttgtcgagtgtaaaatagtctttgccgagtgtcttagacactcggcaaagaacgtgattccggtagtgaatagatacgttcattcataggagtacgcacgtgtgccgtgcaggagggtctcggtttacaccatgttctttttttagaagaaaaaaattaaacttgtcctaagcaggacgtacggtagcacctactgccaataagatatatattgctgctggtaaaatattttataatgtttatggctttataatgtttaaacttgtcctaatagctgacacatgacagactctaacctttcagtttccttgaaaagcagtaggccagcagccacaccccaggcgacagatggcgcgatcgtccacatggtggaggtggatagcagcaatccaggcttttccagtttggttccaaggcggcctccgtgtttttaattttacacacacatatatacatcctcctctcgttttcttcggccacttcttttttcttcttcttcttctttttgttgcacacatatatgtattccagggaaatttcccttggtgtgtgccatatacatgcatgtggaggagacggggatggagagctgtgagctagtcccctttgtactacagaaagaaagtgcgtgctgcccttatttctggaatgaaaaggcagaatgggaagagggggaaaaaaggggatagatagatgtggaggttgagggagacccacaccaccatataaacccccctcttccaaactagtcacacatggcacaagcacacagctcatcagttcttcttcgtcgtcttggctagctgcctagctagctagctagttcctcactcctctccgagaaccccctttttcatctctctctctctctctcggtctcgcccagctcctttcgatgttatcgtctctgctggcctcgcaactcgtcgagagagactcgtgaaaaagaatccagatatagctagagagaccgagagggcagctagcatgtcgatgagcttcttgagcatggtggaggcggagctgccgccggggttccggttccacccgagggacgacgagctcatctgcgactacctcgcgcccaagctcggcgccaagcccggcttctccggctgccgcccgcccatggtcgacgtcgacctcaacaaggtcgagccatgggatctccccggtgagtacgtacgtccacgcaagtagctagataaatcttttttttaatttgctagcgctcctttctttttctacgaccttcttctcagctaataaaagctagctagctgtgcgtcttccttgattaattcctccatgatacttgcaccaagttgatgcatatatgcgcacggagaggagaaagatgcagagaaatcacacacgtcaaatttccctagcttgctcgacacaacacgatccttaaatctgtccctgtttattatattctagtccacgatcaaaactcacagctttttccgtttttttaaataaaacacagcctcttaatttctgctgttttttttaaaaaaatcatgattttccagaataaagctatttgggatcgatcctctgttgcttcagcgtcaagagaaacaccacacgagtccccggccaaatgtgctgttcatacactaaactgctgcacacacatcacaccactctcctacatacttttatttttcgtcagcaagctagctaggatattaatatcgacgttttgctacctaaacctttagaaataattcatgatcgatctcgttttcatgcctatatatgatcatttccttgtcttcctcttcactcggtatatgttttctatacctcttctttttgttaccatgaacttgacttgttgatgacgcctccccaacaaatgaatagttatgaccagctgtattttaagtcggaggtcaaactaaaattaagcagtaggtatacacacaccattaattaattgaaaaacacatcgatttaatttgttttccgttcgtcggctgtaattatccaatttgtacacgatggtttctttgtttgtttctgaaaccttctcgcgcgcgcggtggtataatatcaacgtcacgatcagagtacgcgtgtacacgtactgcgctctcgatatgcacaagaccacactaacaaagctagccaagcgtccgtcgtttggacgagctttttgccaatctaaaaagaagagtaaatttaatttgaatcatttggggtggttcatctaaattcaccgcgaggaacgacaaccctctgctatatggtatatctctcgatttgtttaagctggtgaagccgtcctgctgcctgccaaatagatagactctagcaactactgagttttaaaaagagaaacaaaattaaagaatgacaaccttttacggccaaaccccttttaacgtctggccaacgaatcttctcttcgacctgttttagcttgtgtccaaaatgctttccgtcgtagccctgcgttcgttactagataccgctcaccatttgatcttgattatgaaaacattgaccttatatatatatatatatatatatagccaagtattttttaatctaatatggaataagagaaaaactaatgtgcgtgcaactatcagaagcaaaattttctgtttttttcttctaacattgttgggtaaattagaattcaaaattttatgtatcggtatactatatattataataccctccagctcagattcaaatccgttttagataattaatagattcatacaacacttaatggtgtgtgtacatgttttatacacgtgtctagattcattatcatctatttgaatatagtagacataaaaatcaagatcaaaaccgaatactactttagcacggagtgagtaaaagtataagtataatattttttggggatatttgggatttttttaattttgattacacgacgattatattatattgtacggccggggaagcgttgattgtgcacagactgcatgccgtacaaactgcaagaataatcgtacatgtacatgcatgctgatgaactgaaagatcttgagctcgtggccctcctaatttgttaaataaaaatgcacatcggaaagcaacaaactgcaaatcacgccttacgcatgagatctcagattcccagcacgctctctctctctctctctgtctgcacatcacgtcacgtgtccctcccctcttgtgaattgatgcccggatcagcacactactggtagcagaaggtcccaaaactaagctatgcatgggcgggctacatacatacaccacccccatgctatttctagcagagtggctccaaacctcagcatccacagtacaggctacagcgtgtggttgtgatggtgaccacaagaatcctactacatgcatgctgatgatgtgctgcagtgaacactcactcactgcccatgaacagcgtctcctacctgccagccagtgccaagaacaatgaatgaatgattaactgctggcttcgcttgctgaaccattcccctcctcgtgtgcgcatgatgggcatgcagtggcggcgtcggtggggccgcgggagtggtacttcttcagcctcaaggaccgcaagtacgcgacggggcagcggacgaaccgggccacggtgtccgggtactggaaggcgacggggaaggaccgaccagtggtggcggcgcggcgaggcgcgctggtggggatgcgcaagacgctcgtgttctaccaggggagggcgcccaagggcaggaagacggagtgggtgatgcacgagtacaggatggagccagctgctcctcttcttgatcaccaaccctcctcatccaactccaaggtaaaatcggtcgatccattattcgatgaaacgacaagttaagactccattaattcgacgaactgaccgggggtgttttaactgtttcgttgtcgtccatcgatccttctcctgtcatcatgtcaccagcaggatgaagattgggtgctgtgcagagtcatctgcaagaagaaactggcagcaggaggccgcgcaggagggggcagctcgaggagcctggtcgccagcaacggcggccgcgagaccgcgccagccaccccgccgccgccgccgctgccacctcgcatggacacggacgccaccctagcacagctccaggccgccatgcacgccaccgccggcgcgctcgagcaggtgccctgcttctccagcttcaacaacaacactgccagctctagagctgctgccgcagcagcagcagcgcagccatgctacctgcccagcatggccacaggcggcagccacggcacgacgagctactacctagaccacgcgatgctgccgcctgagctgggtggctgcttcgatcctctccacggcgacaagaagctgctcaaggcggtgctgggccagctcggcggcgacgcggtggcgccgggcctgagcctgcagcacgagatggccgcgggcgctgtcgtcgcttcatccgcttggatgaatcacttctaggggacattagttcagcagcgaacctaagtatgtgattggttgcgtatattatgggaaatacatacatatatacataattgtgtggtgaaacatttgtgtgtgaggcaaggagtagagcatgcgtcatttttttggttgctgccgatcgatttggacgaaggccatgaggcaaggagtagaactctgtaatataatgatggctgctcaagtgtgtgtacacattcagatgcagaggtcgtatgtcatgagcgatgatcaggagaatttcagattggttattttactgtgcctgaactcaaccccaagatcacacttgacaccactcactcactcactcactcagagacacagtgcacattcatagaatcatcatggtaaacagacagaagacagaacagtggctgccaaacccaatcaatcatgccatttatgcaggaaagtaggcatgacagtcacatccgagcatctcttctttaccacaccatctttctttttccgatgtgtattgttgcgatgacaatcatgctaaccaagcagtcagctgagtgagggctcctgggcactggctttccactgcact

SEQ ID NO: 344 - DNA, 4672 bp, synthetic construct
  misc_feature 1..4672: note = PHV00002
  source 1..4672: mol_type = other DNA
gaagttcctattccgaagttcctattcttcaaaaagtataggaacttcggtaccaaacaagtatgttttataattattttgatcttgatatacttggatgatggcatatgcagcagctatatgtggatttttttagccctgccttcatacgctatttatttgcttggtactgtttcttttgtcgatgctcaccctgttgtttggtgttacttctgcaggtcgactttaacttagcctagggaagttcctattccgaagttcctattctctagaaagtataggaacttcagatccaccgggatccaccatggttgaacaagatggattgcacgcaggttctccggccgcttgggtggagaggctattcggctatgactgggcacaacagacaatcggctgctctgatgccgccgtgttccggctgtcagcgcaggggcgcccggttctttttgtcaagaccgacctgtccggtgccctgaatgaactgcaggacgaggcagcgcggctatcgtggctggccacgacgggcgttccttgcgcagctgtgctcgacgttgtcactgaagcgggaagggactggctgctattgggcgaagtgccggggcaggatctcctgtcatctcaccttgctcctgccgagaaagtatccatcatggctgatgcaatgcggcggctgcatacgcttgatccggctacctgcccattcgaccaccaagcgaaacatcgcatcgagcgagcacgtactcggatggaagccggtcttgtcgatcaggatgatctggacgaagagcatcaggggctcgcgccagccgaactgttcgccaggctcaaggcgcgcatgcccgacggcgatgatctcgtcgtgacccatggcgatgcctgcttgccgaatatcatggtggaaaatggccgcttttctggattcatcgactgtggccggctgggtgtggcggaccgctatcaggacatagcgttggctacccgtgatattgctgaagagcttggcggcgaatgggctgaccgcttcctcgtgctttacggtatcgccgctcccgattcgcagcgcatcgccttctatcgccttcttgacgagttcttctgaggatccaccatggttaacctagacttgtccatcttctggattggccaacttaattaatgtatgaaataaaaggatgcacacatagtgacatgctaatcactataatgtgggcatcaaagttgtgtgttatgtgtaattactagttatctgaataaaagagaaagagatcatccatatttcttatcctaaatgaatgtcacgtgtctttataattctttgatgaaccagatgcatttcattaaccaaatccatatacatataaatattaatcatatataattaatatcaattgggttagcaaaacaaatctagtctaggtgtgttttgcgaatgcggccctagcgcaactttgtatagaaaagttgggccgaattcgagctcggtacggccagaatggcccggaccgaagcttgcatgcctgcagtgcagcgtgacccggtcgtgcccctctctagagataatgagcattgcatgtctaagttataaaaaattaccacatattttttttgtcacacttgtttgaagtgcagtttatctatctttatacatatatttaaactttactctacgaataatataatctatagtactacaataatatcagtgttttagagaatcatataaatgaacagttagacatggtctaaaggacaattgagtattttgacaacaggactctacagttttatctttttagtgtgcatgtgttctcctttttttttgcaaatagcttcacctatataatacttcatccattttattagtacatccatttagggtttagggttaatggtttttatagactaatttttttagtacatctattttattctattttagcctctaaattaagaaaactaaaactctattttagtttttttatttaataatttagatataaaatagaataaaataaagtgactaaaaattaaacaaataccctttaagaaattaaaaaaactaaggaaacatttttcttgtttcgagtagataatgccagcctgttaaacgccgtcgacgagtctaacggacaccaaccagcgaaccagcagcgtcgcgtcgggccaagcgaagcagacggcacggcatctctgtcgctgcctctggacccctctcgagagttccgctccaccgttggacttgctccgctgtcggcatccagaaattgcgtggcggagcggcagacgtgagccggcacggcaggcggcctcctcctcctctcacggcaccggcagctacgggggattcctttcccaccgctccttcgctttcccttcctcgcccgccgtaataaatagacaccccctccacaccctctttccccaacctcgtgttgttcggagcgcacacacacacaaccagatctcccccaaatccacccgtcggcacctccgcttcaaggtacgccgctcgtcctcccccccccccctctctaccttctctagatcggcgttccggtccatgcatggttagggcccggtagttctacttctgttcatgtttgtgttagatccgtgtttgtgttagatccgtgctgctagcgttcgtacacggatgcgacctgtacgtcagacacgttctgattgctaacttgccagtgtttctctttggggaatcctgggatggctctagccgttccgcagacgggatcgatttcatgattttttttgtttcgttgcatagggtttggtttgcccttttcctttatttcaatatatgccgtgcacttgtttgtcgggtcatcttttcatgcttttttttgtcttggttgtgatgatgtggtctggttgggcggtcgttctagatcggagtagaattctgtttcaaactacctggtggatttattaattttggatctgtatgtgtgtgccatacatattcatagttacgaattgaagatgatggatggaaatatcgatctaggataggtatacatgttgatgcgggttttactgatgcatatacagagatgctttttgttcgcttggttgtgatgatgtggtgtggttgggcggtcgttcattcgttctagatcggagtagaatactgtttcaaactacctggtgtatttattaattttggaactgtatgtgtgtgtcatacatcttcatagttacgagtttaagatggatggaaatatcgatctaggataggtatacatgttgatgtgggttttactgatgcatatacatgatggcatatgcagcatctattcatatgctctaaccttgagtacctatctattataataaacaagtatgttttataattattttgatcttgatatacttggatgatggcatatgcagcagctatatgtggatttttttagccctgccttcatacgctatttatttgcttggtactgtttcttttgtcgatgctcaccctgttgtttggtgttacttctgcaggtcgactctagaggatccatggcccagtccaagcacggcctgaccaaggagatgaccatgaagtaccgcatggagggctgcgtggacggccacaagttcgtgatcaccggcgagggcatcggctaccccttcaagggcaagcaggccatcaacctgtgcgtggtggagggcggccccttgcccttcgccgaggacatcttgtccgccgccttcatgtacggcaaccgcgtgttcaccgagtacccccaggacatcgtcgactacttcaagaactcctgccccgccggctacacctgggaccgctccttcctgttcgaggacggcgccgtgtgcatctgcaacgccgacatcaccgtgagcgtggaggagaactgcatgtaccacgagtccaagttctacggcgtgaacttccccgccgacggccccgtgatgaagaagatgaccgacaactgggagccctcctgcgagaagatcatccccgtgcccaagcagggcatcttgaagggcgacgtgagcatgtacctgctgctgaaggacggtggccgcttgcgctgccagttcgacaccgtgtacaaggccaagtccgtgccccgcaagatgcccgactggcacttcatccagcacaagctgacccgcgaggaccgcagcgacgccaagaaccagaagtggcacctgaccgagcacgccatcgcctccggctccgccttgccctccggactcagatctcgatagagtcaacctagacttgtccatcttctggattggccaacttaattaatgtatgaaataaaaggatgcacacatagtgacatgctaatcactataatgtgggcatcaaagttgtgtgttatgtgtaattactagttatctgaataaaagagaaagagatcatccatatttcttatcctaaatgaatgtcacgtgtctttataattctttgatgaaccagatgcatttcattaaccaaatccatatacatataaatattaatcatatataattaatatcaattgggttagcaaaacaaatctagtctaggtgtgttttgctatacgaagttcctattccgaagttcctattcttcaaaaagtataggaacttctgtacacctgagcaacattaagttatgacgaagaagaacggaaacgccttaaac

SEQ ID NO: 345 - DNA, 9291 bp, synthetic construct
  misc_feature 1..9291: note = PHV00003
  source 1..9291: mol_type = other DNA
gaagttcctattccgaagttcctattcttcaaaaagtataggaacttcggtaccaaacaagtatgttttataattattttgatcttgatatacttggatgatggcatatgcagcagctatatgtggatttttttagccctgccttcatggatctttttggaatgctgctccgtcgtcaggctttccgacgtttgggtggttgaacagaagtcattatcgcacggaatgccaagcactcccgaggggaaccctgtggttggcatgcacatacaaatggacgaacggataaaccttttcacgcccttttaaatatccgttattctaataaacgctcttttctcttaggtttacccgccaatatatcctgtcaaacactgatagtttaaactgaaggcgggaaacgacaatctgatcatgagccttaagcttgatatcatgataagaaaacatactagacattaataatctgctagaaatgggaagaatcacgcgtaagcttgcatgcctgcagtgcagcgtgacccggtcgtgcccctctctagagataatgagcattgcatgtctaagttataaaaaattaccacatattttttttgtcacacttgtttgaagtgcagtttatctatctttatacatatatttaaactttactctacgaataatataatctatagtactacaataatatcagtgttttagagaatcatataaatgaacagttagacatggtctaaaggacaattgagtattttgacaacaggactctacagttttatctttttagtgtgcatgtgttctcctttttttttgcaaatagcttcacctatataatacttcatccattttattagtacatccatttagggtttagggttaatggtttttatagactaatttttttagtacatctattttattctattttagcctctaaattaagaaaactaaaactctattttagtttttttatttaataatttagatataaaatagaataaaataaagtgactaaaaattaaacaaataccctttaagaaattaaaaaaactaaggaaacatttttcttgtttcgagtagataatgccagcctgttaaacgccgtcgacgagtctaacggacaccaaccagcgaaccagcagcgtcgcgtcgggccaagcgaagcagacggcacggcatctctgtcgctgcctctggacccctctcgagagttccgctccaccgttggacttgctccgctgtcggcatccagaaattgcgtggcggagcggcagacgtgagccggcacggcaggcggcctcctcctcctctcacggcaccggcagctacgggggattcctttcccaccgctccttcgctttcccttcctcgcccgccgtaataaatagacaccccctccacaccctctttccccaacctcgtgttgttcggagcgcacacacacacaaccagatctcccccaaatccacccgtcggcacctccgcttcaaggtacgccgctcgtcctcccccccccccctctctaccttctctagatcggcgttccggtccatgcatggttagggcccggtagttctacttctgttcatgtttgtgttagatccgtgtttgtgttagatccgtgctgctagcgttcgtacacggatgcgacctgtacgtcagacacgttctgattgctaacttgccagtgtttctctttggggaatcctgggatggctctagccgttccgcagacgggatcgatttcatgattttttttgtttcgttgcatagggtttggtttgcccttttcctttatttcaatatatgccgtgcacttgtttgtcgggtcatcttttcatgcttttttttgtcttggttgtgatgatgtggtctggttgggcggtcgttctagatcggagtagaattctgtttcaaactacctggtggatttattaattttggatctgtatgtgtgtgccatacatattcatagttacgaattgaagatgatggatggaaatatcgatctaggataggtatacatgttgatgcgggttttactgatgcatatacagagatgctttttgttcgcttggttgtgatgatgtggtgtggttgggcggtcgttcattcgttctagatcggagtagaatactgtttcaaactacctggtgtatttattaattttggaactgtatgtgtgtgtcatacatcttcatagttacgagtttaagatggatggaaatatcgatctaggataggtatacatgttgatgtgggttttactgatgcatatacatgatggcatatgcagcatctattcatatgctctaaccttgagtacctatctattataataaacaagtatgttttataattattttgatcttgatatacttggatgatggcatatgcagcagctatatgtggatttttttagccctgccttcatacgctatttatttgcttggtactgtttcttttgtcgatgctcaccctgttgtttggtgttacttctgcaggtcgactttaacttagcctaggatccaacaatgccccagttcgacatcctctgcaagaccccccccaaggtgctcgtgaggcagttcgtggagaggttcgagaggccctccggcgagaagatcgccctctgcgccgccgagctcacctacctctgctggatgatcacccacaacggcaccgccattaagagggccaccttcatgtcatacaacaccatcatctccaactccctctccttcgacatcgtgaacaagtccctccagttcaaatacaagacccagaaggccaccatcctcgaggcctccctcaagaagctcatccccgcctgggagttcaccatcatcccctactacggccagaagcaccagtccgacatcaccgacatcgtgtcatccctccagcttcagttcgagtcctccgaggaggctgacaagggcaactcccactccaagaagatgctgaaggccctcctctccgagggcgagtccatctgggagatcaccgagaagatcctcaactccttcgagtacacctccaggttcactaagaccaagaccctctaccagttcctcttcctcgccaccttcatcaactgcggcaggttctcagacatcaagaacgtggaccccaagtccttcaagctcgtgcagaacaagtacctaggtttgtttctgcttctacctttgatatatatataataattatcattaattagtagtaatataatatttcaaatatttttttcaaaataaaagaatgtagtatatagcaattgcttttctgtagtttataagtgtgtatattttaatttataacttttctaatatatgaccaaaacatggtgatgcctaggtgtcatcatccagtgcctcgtgaccgagaccaagacctccgtgtccaggcacatctacttcttctccgctcgcggcaggatcgaccccctcgtgtacctcgacgagttcctcaggaactcagagcccgtgctcaagagggtgaacaggaccggcaactcctcctccaacaagcaggagtaccagctcctcaaggacaacctcgtgaggtcctacaacaaggccctcaagaagaacgccccctactccatcttcgccatcaagaacggccccaagtcccacatcggtaggcacctcatgacctccttcctctcaatgaagggcctcaccgagctcaccaacgtggtgggcaactggtccgacaagagggcctccgccgtggccaggaccacctacacccaccagatcaccgccatccccgaccactacttcgccctcgtgtcaaggtactacgcctacgaccccatctccaaggagatgatcgccctcaaggacgagactaaccccatcgaggagtggcagcacatcgagcagctcaagggctccgccgagggctccatcaggtaccccgcctggaacggcatcatctcccaggaggtgctcgactacctctcctcctacatcaacaggaggatctgagttaacctagacttgtccatcttctggattggccaacttaattaatgtatgaaataaaaggatgcacacatagtgacatgctaatcactataatgtgggcatcaaagttgtgtgttatgtgtaattactagttatctgaataaaagagaaagagatcatccatatttcttatcctaaatgaatgtcacgtgtctttataattctttgatgaaccagatgcatttcattaaccaaatccatatacatataaatattaatcatatataattaatatcaattgggttagcaaaacaaatctagtctaggtgtgttttgcggtcacaccggttaaaaccaaaatccagtggcgagctctcgagtcgatcgctatggccgaattcgagctcggtacggccagaatggcccggaccgggttaccacgctatttatttgcttggtactgtttcttttgtcgatgctcaccctgttgtttggtgttacttctgcaggtcgactttaacttagcctagggaagttcctattccgaagttcctattctctagaaagtataggaacttcagatccaccgggatccaccatggttgaacaagatggattgcacgcaggttctccggccgcttgggtggagaggctattcggctatgactgggcacaacagacaatcggctgctctgatgccgccgtgttccggctgtcagcgcaggggcgcccggttctttttgtcaagaccgacctgtccggtgccctgaatgaactgcaggacgaggcagcgcggctatcgtggctggccacgacgggcgttccttgcgcagctgtgctcgacgttgtcactgaagcgggaagggactggctgctattgggcgaagtgccggggcaggatctcctgtcatctcaccttgctcctgccgagaaagtatccatcatggctgatgcaatgcggcggctgcatacgcttgatccggctacctgcccattcgaccaccaagcgaaacatcgcatcgagcgagcacgtactcggatggaagccggtcttgtcgatcaggatgatctggacgaagagcatcaggggctcgcgccagccgaactgttcgccaggctcaaggcgcgcatgcccgacggcgatgatctcgtcgtgacccatggcgatgcctgcttgccgaatatcatggtggaaaatggccgcttttctggattcatcgactgtggccggctgggtgtggcggaccgctatcaggacatagcgttggctacccgtgatattgctgaagagcttggcggcgaatgggctgaccgcttcctcgtgctttacggtatcgccgctcccgattcgcagcgcatcgccttctatcgccttcttgacgagttcttctgaggatccaccatggttaacctagacttgtccatcttctggattggccaacttaattaatgtatgaaataaaaggatgcacacatagtgacatgctaatcactataatgtgggcatcaaagttgtgtgttatgtgtaattactagttatctgaataaaagagaaagagatcatccatatttcttatcctaaatgaatgtcacgtgtctttataattctttgatgaaccagatgcatttcattaaccaaatccatatacatataaatattaatcatatataattaatatcaattgggttagcaaaacaaatctagtctaggtgtgttttgcgaatgcggccctagcgcaactttgtatagaaaagttgggccgaattcgagctcggtacggccagaatggcccggaccgaagcttgcatgcctgcagtgcagcgtgacccggtcgtgcccctctctagagataatgagcattgcatgtctaagttataaaaaattaccacatattttttttgtcacacttgtttgaagtgcagtttatctatctttatacatatatttaaactttactctacgaataatataatctatagtactacaataatatcagtgttttagagaatcatataaatgaacagttagacatggtctaaaggacaattgagtattttgacaacaggactctacagttttatctttttagtgtgcatgtgttctcctttttttttgcaaatagcttcacctatataatacttcatccattttattagtacatccatttagggtttagggttaatggtttttatagactaatttttttagtacatctattttattctattttagcctctaaattaagaaaactaaaactctattttagtttttttatttaataatttagatataaaatagaataaaataaagtgactaaaaattaaacaaataccctttaagaaattaaaaaaactaaggaaacatttttcttgtttcgagtagataatgccagcctgttaaacgccgtcgacgagtctaacggacaccaaccagcgaaccagcagcgtcgcgtcgggccaagcgaagcagacggcacggcatctctgtcgctgcctctggacccctctcgagagttccgctccaccgttggacttgctccgctgtcggcatccagaaattgcgtggcggagcggcagacgtgagccggcacggcaggcggcctcctcctcctctcacggcaccggcagctacgggggattcctttcccaccgctccttcgctttcccttcctcgcccgccgtaataaatagacaccccctccacaccctctttccccaacctcgtgttgttcggagcgcacacacacacaaccagatctcccccaaatccacccgtcggcacctccgcttcaaggtacgccgctcgtcctcccccccccccctctctaccttctctagatcggcgttccggtccatgcatggttagggcccggtagttctacttctgttcatgtttgtgttagatccgtgtttgtgttagatccgtgctgctagcgttcgtacacggatgcgacctgtacgtcagacacgttctgattgctaacttgccagtgtttctctttggggaatcctgggatggctctagccgttccgcagacgggatcgatttcatgattttttttgtttcgttgcatagggtttggtttgcccttttcctttatttcaatatatgccgtgcacttgtttgtcgggtcatcttttcatgcttttttttgtcttggttgtgatgatgtggtctggttgggcggtcgttctagatcggagtagaattctgtttcaaactacctggtggatttattaattttggatctgtatgtgtgtgccatacatattcatagttacgaattgaagatgatggatggaaatatcgatctaggataggtatacatgttgatgcgggttttactgatgcatatacagagatgctttttgttcgcttggttgtgatgatgtggtgtggttgggcggtcgttcattcgttctagatcggagtagaatactgtttcaaactacctggtgtatttattaattttggaactgtatgtgtgtgtcatacatcttcatagttacgagtttaagatggatggaaatatcgatctaggataggtatacatgttgatgtgggttttactgatgcatatacatgatggcatatgcagcatctattcatatgctctaaccttgagtacctatctattataataaacaagtatgttttataattattttgatcttgatatacttggatgatggcatatgcagcagctatatgtggatttttttagccctgccttcatacgctatttatttgcttggtactgtttcttttgtcgatgctcaccctgttgtttggtgttacttctgcaggtcgactctatggcctcctccgagaacgtcatcaccgagttcatgcgcttcaaggtgcgcatggagggcaccgtgaacggccacgagttcgagatcgagggcgagggcgagggccgcccctacgagggccacaacaccgtgaagctgaaggtgacgaagggcggccccctgcccttcgcctgggacatcctgtccccccagttccagtacggctccaaggtgtacgtgaagcaccccgccgacatccccgactacaagaagctgtccttccccgagggcttcaagtgggagcgcgtgatgaacttcgaggacggcggcgtggcgaccgtgacccaggactcctccctgcaggacggctgcttcatctacaaggtgaagttcatcggcgtgaacttcccctccgacggccccgtgatgcagaagaagaccatgggctgggaggcctccaccgagcgcctgtacccccgcgacggcgtgctgaagggcgagacccacaaggccctgaagctgaaggacggcggccactacctggtggagttcaagtccatctacatggccaagaagcccgtgcagctgcccggctactactacgtggacgccaagctggacatcacctcccacaacgaggactacaccatcgtggagcagtacgagcgcaccgagggccgccaccacctgttcctgtagagaggatccagtcaacctagacttgtccatcttctggattggccaacttaattaatgtatgaaataaaaggatgcacacatagtgacatgctaatcactataatgtgggcatcaaagttgtgtgttatgtgtaattactagttatctgaataaaagagaaagagatcatccatatttcttatcctaaatgaatgtcacgtgtctttataattctttgatgaaccagatgcatttcattaaccaaatccatatacatataaatattaatcatatataattaatatcaattgggttagcaaaacaaatctagtctaggtgtgttttgctatacgaagttcctattccgaagttcctattcttcaaaaagtataggaacttctgtacacctgagcaacatctaactaactaggacgtcccgaggtccgattccgggctaattaacacctagctcgccactcgactaattagggactaagcctagcgcttagccgttaaaacctagcacaccctaagcacccttagttaggttcccctcttaattaagccctagtgagcccctaagttaaggggacgctaagagccccctaacctagtattcggctagaggcgaactaggctaaacacctaagcgcacctctttaagctagatcgctagggggctaggctagagcttcgctagattagtctaagggcagctaactaactaggtttaaactacattaaaaacgtccgcaatgtgttattaagttgtctaagcgtcaattttaagttatgacgaagaaggtttacaccacaatatatcctgccaaacggaaacgccttaaac

SEQ ID NO: 346 - DNA, 3757 bp, synthetic construct
  misc_feature 1..3757: note = PHV00004
  source 1..3757: mol_type = other DNA
agggggatgtgctgcaaggcgattaagttgggtaacgccagggttttcccagtcacgacgttgtaaaacgacggccagtgccaagcttgcatgcctgcagtgcagcgtgacccggtcgtgcccctctctagagataatgagcattgcatgtctaagttataaaaaattaccacatattttttttgtcacacttgtttgaagtgcagtttatctatctttatacatatatttaaactttactctacgaataatataatctatagtactacaataatatcagtgttttagagaatcatataaatgaacagttagacatggtctaaaggacaattgagtattttgacaacaggactctacagttttatctttttagtgtgcatgtgttctcctttttttttgcaaatagcttcacctatataatacttcatccattttattagtacatccatttagggtttagggttaatggtttttatagactaatttttttagtacatctattttattctattttagcctctaaattaagaaaactaaaactctattttagtttttttatttaataatttagatataaaatagaataaaataaagtgactaaaaattaaacaaataccctttaagaaattaaaaaaactaaggaaacatttttcttgtttcgagtagataatgccagcctgttaaacgccgtcgacgagtctaacggacaccaaccagcgaaccagcagcgtcgcgtcgggccaagcgaagcagacggcacggcatctctgtcgctgcctctggacccctctcgagagttccgctccaccgttggacttgctccgctgtcggcatccagaaattgcgtggcggagcggcagacgtgagccggcacggcaggcggcctcctcctcctctcacggcacggcagctacgggggattcctttcccaccgctccttcgctttcccttcctcgcccgccgtaataaatagacaccccctccacaccctctttccccaacctcgtgttgttcggagcgcacacacacacaaccagatctcccccaaatccacccgtcggcacctccgcttcaaggtacgccgctcgtcctccccccccccccctctctaccttctctagatcggcgttccggtccatggttagggcccggtagttctacttctgttcatgtttgtgttagatccgtgtttgtgttagatccgtgctgctagcgttcgtacacggatgcgacctgtacgtcagacacgttctgattgctaacttgccagtgtttctctttggggaatcctgggatggctctagccgttccgcagacgggatcgatttcatgattttttttgtttcgttgcatagggtttggtttgcccttttcctttatttcaatatatgccgtgcacttgtttgtcgggtcatcttttcatgcttttttttgtcttggttgtgatgatgtggtctggttgggcggtcgttctagatcggagtagaattctgtttcaaactacctggtggatttattaattttggatctgtatgtgtgtgccatacatattcatagttacgaattgaagatgatggatggaaatatcgatctaggataggtatacatgttgatgcgggttttactgatgcatatacagagatgctttttgttcgcttggttgtgatgatgtggtgtggttgggcggtcgttcattcgttctagatcggagtagaatactgtttcaaactacctggtgtatttattaattttggaactgtatgtgtgtgtcatacatcttcatagttacgagtttaagatggatggaaatatcgatctaggataggtatacatgttgatgtgggttttactgatgcatatacatgatggcatatgcagcatctattcatatgctctaaccttgagtacctatctattataataaacaagtatgttttataattattttgatcttgatatacttggatgatggcatatgcagcagctatatgtggatttttttagccctgccttcatacgctatttatttgcttggtactgtttcttttgtcgatgctcaccctgttgtttggtgttacttctgcaggtcgactctagaggatccaacaatgccccagttcgacatcctctgcaagaccccccccaaggtgctcgtgaggcagttcgtggagaggttcgagaggccctccggcgagaagatcgccctctgcgccgccgagctcacctacctctgctggatgatcacccacaacggcaccgccattaagagggccaccttcatgtcatacaacaccatcatctccaactccctctccttcgacatcgtgaacaagtccctccagttcaaatacaagacccagaaggccaccatcctcgaggcctccctcaagaagctcatccccgcctgggagttcaccatcatcccctactacggccagaagcaccagtccgacatcaccgacatcgtgtcatccctccagcttcagttcgagtcctccgaggaggctgacaagggcaactcccactccaagaagatgctgaaggccctcctctccgagggcgagtccatctgggagatcaccgagaagatcctcaactccttcgagtacacctccaggttcactaagaccaagaccctctaccagttcctcttcctcgccaccttcatcaactgcggcaggttctcagacatcaagaacgtggaccccaagtccttcaagctcgtgcagaacaagtacctcggcgtgatcatccagtgcctcgtgaccgagaccaagacctccgtgtccaggcacatctacttcttctccgctcgcggcaggatcgaccccctcgtgtacctcgacgagttcctcaggaactcagagcccgtgctcaagagggtgaacaggaccggcaactcctcctccaacaagcaggagtaccagctcctcaaggacaacctcgtgaggtcctacaacaaggccctcaagaagaacgccccctactccatcttcgccatcaagaacggccccaagtcccacatcggtaggcacctcatgacctccttcctctcaatgaagggcctcaccgagctcaccaacgtggtgggcaactggtccgacaagagggcctccgccgtggccaggaccacctacacccaccagatcaccgccatccccgaccactacttcgccctcgtgtcaaggtactacgcctacgaccccatctccaaggagatgatcgccctcaaggacgagactaaccccatcgaggagtggcagcacatcgagcagctcaagggctccgccgagggctccatcaggtaccccgcctggaacggcatcatctcccaggaggtgctcgactacctctcctcctacatcaacaggaggatctgagttaacctagacttgtccatcttctggattggccaacttaattaatgtatgaaataaaaggatgcacacatagtgacatgctaatcactataatgtgggcatcaaagttgtgtgttatgtgtaattactagttatctgaataaaagagaaagagatcatccatatttcttatcctaaatgaatgtcacgtgtctttataattctttgatgaaccagatgcatttcattaaccaaatccatatacatataaatattaatcatatataattaatatcaattgggttagcaaaacaaatctagtctaggtgtgttttgcgaattgcggccgccaccgcggtggagctcgaattcagtacattaaaaacgtccgcaatgtg

SEQ ID NO: 347 - DNA, 3296 bp, synthetic construct
  misc_feature 1..3296: note = PHV00005
  source 1..3296: mol_type = other DNA
ttcggtacggccagaatggcccggaccgggttaccaagcggccgcatcgagcagctggcttgtggggaccagacaaaaaaggaatggtgcagaattgttaggcgcacctaccaaaagcatctttgcctttattgcaaagataaagcagattcctctagtacaagtggggaacaaaataacgtggaaaagagctgtcctgacagcccactcactaatgcgtatgacgaacgcagtgacgaccacaaaactcgagcaacgagatcatgagccaatcaaagaggagtgatgtagacctaaagcaataatggagccatgacgtaagggcttacgcccatacgaaataattaaaggctgatgtgacctgtcggtctctcagaacctttactttttatgtttggcgtgtatttttaaatttccacggcaatgacgatgtgaccgtcgacccactaaaacattgctttgtcaaaagctaaaaaagatgatgcccgacagccacttgtgtgaagcatgagaagccggtccctccactaagaaaattagtgaagcatcttccagtggtccctccactcacagctcaatcagtgagcaacaggacgaaggaaatgacgtaagccatgacgtctaatcccagggcccggtgaccaatcgaattcttaccctagctccctgcggctgttacgcggtcccccatcaatcttctgttcttgcggttgtagcctgtgtaacagtgctagagtatgtatgataaataggttttaagtctgcttacatgacattttttattgtggaagagacatataaaaattagagagagtggttctcatgcaacggcggacggcccggtgctaaaagagcttcaagacaaaataatgaaacaggaagagagtagatttatctaagagccaactttattatatgaatgtgtttattgttggctttagatgatatggtaaggagttagagctaataatagataggctctattattattattattaattaaactcgctctaaggaggaaagtgggaggaagggacgaggacgaagactactggaagcatcgtgcatggatgatggatgtggtgtctcttaatgtaggtggccggaggatgtacgtgttaattgcgcgataagcactcagatccaaccgcaaactacctccacactgacacactgatagagagaaagagagacctccgacgactgccgccgcagatgagccacgtacgtatacgacgtctgccggccggctcaggctgccgccatcaccctgctcgaaagtcgcgttaggcggcgccagctacataggagtatctagtctagccagttagtatactactactgcgctgatgatgaattaactctgcatagatactgtacttgcctccctccaacacccaaccacctcctgctcggctcttaataacttggacacggatcgatgccatccaaggaagaacacgacgacgacgacggaacatccaccatgcaagcttgcatccatacgccgatacgcgtgcatccatccatccaccattatttccattttccaccgatcacacgtacacaggcctatttaaggagcgacatcccactgcaactctcctcaccactcatcaccagctagctctagcaaagcacttgccatctaccgaccgccgcattccaaacagcccgacgagctagcagagcggcaggcacctccctcctcaaggaacccatggcggccaatgcgggcggcggtggagcgggaggaggcagcggcagcggcagcgtggctgcgccggcggtgtgccgccccagcggctcgcggtggacgccgacgccggagcagatcaggatgctgaaggagctctactacggctgcggcatccggtcgcccagctcggagcagatccagcgcatcaccgccatgctgcggcagcacggcaagatcgagggcaagaacgtcttctactggttccagaaccacaaggcccgcgagcgccagaagcgccgcctcaccagcctcgacgtcaacgtgcccgccgccggcgcggccgacgccaccaccagccaactcggcgtcctctcgctgtcgtcgccgccgccttcaggcgcggcgcctccctcgcccaccctcggcttctacgccgccggcaatggcggcggatcggctgtgctgctggacacgagttccgactggggcagcagcggcgctgctatggccaccgagacatgcttcctgcaggactacatgggcgtgacggacacgggcagctcgtcgcagtggccacgcttctcgtcgtcggacacgataatggcggcggccgcggcgcgggcggcgacgacgcgggcgcccgagacgctccctctcttcccgacctgcggcgacgacggcggcagcggtagcagcagctacttgccgttctggggtgccgcgtccacaactgccggcgccacttcttccgttgcgatccaacagcaacaccagctgcaggagcagtacagcttttacagcaacagcaacagcacccagctggccggcaccggcaaccaagacgtatcggcaacagcagcagcagccgccgccctggagctgagcctcagctcatggtgctccccttaccctgctgcagggagtatgtgagagcaacgcgagctgccactgctcttcactgatgtctctggaatggaaggaggaggaagtgagaacagatcattcgacaaagcagcattagtccgttgatcggtggaagaccactcgtcagtgttgagttgaatgtttgatcaataaaatacggcaatgctgtaagggttgttttttatgccattgataatacactgtactgttcagttgttgaactctatttcttagccatgccaagtgcttttcttattttgaataacattacagcaaaaagttgaaagacaaaaaaaaaaacccccgaacagagtgctttgggtcccaagcttctttagactgtgttcggcgttccccctaaatttctccccctatatctcactcacttgtcacatcagcgttctctttccccctatatctccacgctctacagcagttccacctatatcaaacctctataccccaccacaacaatattatatactttcatcttcaactaactcatgtaccttccaatttttttctactaataattatttacgtgcacagaaacttagcaaggagagagagagcggggtcacccggtccgggcctagaaggccagcttcaagtttgtacaaagtggccgttaacggatcggccagaatggcccggaccgaagccgaggccggcc

SEQ ID NO: 348 - DNA, 26569 bp, synthetic construct
  misc_feature 1..26569: note = PHV00007
  source 1..26569: mol_type = other DNA
cggataaaccttttcacgcccttttaaatatccgattattctaataaacgctcttttctcttaggtttacccgccaatatatcctgtcaaacactgatagtttaaactgaaggcgggaaacgacaatctgatcatgagcggagaattaagggagtcacgttatgacccccgccgatgacgcgggacaagccgttttacgtttggaactgacagaaccgcaacgttgaaggagccactcagcaagctggtacgattgtaatacgactcactatagggcgaattgagcgctgtttaaacgctcttcaactggaagagcggttactaccggctggatggcggggccttgatcgtgcaccgccggcgtccggaggttaccggccagaatggcccggaccgaagactctcggtccgaagcttgcgatagcggccgcggtacctcactgactagctaatcgagctagttaccctatgaggtgacatgaagcgctcacggttactatgacggttagcttcacgactgttggtggcagtagcgtacgacttagctatagttccggacttacccaactttgtatagaaaagttgggccgagctcggtacggccagaatgataacttcgtatagcatacattatacgaagttatgcccggaccgggttaccgaattcaggcgacccatcgctgctttgtctacatcatgttcttcatcatcctccccaggcgacgcgtgctgctgttcttattcagactaccgttcgagtgactgcatggcgtacatctttctgcatcgactttgtacggctacatcgaacatatacacgagatgtctcgtgtgaatagagtcactaatgccttaagcatcggttactccgtagggtacattctgttcttcttatttgtgcatatttttattgttgtttactgattatacgagtagttatacatacatgcacatacatatcatcacatatatcacaatatttttctaaattaaattaaaactaaaaatgactaaatttctaacaccaacgacattgtaatgttttctccaacaactttacctattctacattgttctatttcgaatttcactctataaacaacatagtctacaatggaaaacagtgctttgtacgactatatacgcgatgtgtggctacaacataagacaatatagtcgtttgaagattgaacctatatatcggtacggttaatccgtctatgtacgtgggcatgacgaacacccgtgataacgaaggattaacgtgcacaatcataaatccaaagtaggagcggtgcatgatgagaatcgctctcagtactcgacataatgaaccttacgaggtacaacaggcaggcaggcagggaccaggggccgcctttatttcaggctcgctggccccacgggcgtgctgcgtgcacgaagggcactaccccaacctctcaccgaaaaccgcgctggatcggcaaatcaaacgaggtggtgccccgtgcccactctccacgtccacggcaccatccctctgcagccgctcaccagccatgccgtgtcgcggaacggcacaaccacccccaacccactcacgaaaccccgtcccggccgtgcccgtgtcggtccgcgctcggcaacgaggcggcccgcgctgctgagtcccctggacacccgacaccctgtcggccctttgtttattcatcccgaaatctcatctgcccccacggccgactgcgctgcgccgcccggatatatatacccatcgttatcgatcgactggggactctatcagtgatagagtctagaggatcgctcaggaaggccgctgagatagaggcatggcggccaatgcgggcggcggtggagcgggaggaggcagcggcagcggcagcgtggctgcgccggcggtgtgccgccccagcggctcgcggtggacgccgacgccggagcagatcaggatgctgaaggagctctactacggctgcggcatccggtcgcccagctcggagcagatccagcgcatcaccgccatgctgcggcagcacggcaagatcgagggcaagaacgtcttctactggttccagaaccacaaggcccgcgagcgccagaagcgccgcctcaccagcctcgacgtcaacgtgcccgccgccggcgcggccgacgccaccaccagccaactcggcgtcctctcgctgtcgtcgccgccgccttcaggcgcggcgcctccctcgcccaccctcggcttctacgccgccggcaatggcggcggatcggctgtgctgctggacacgagttccgactggggcagcagcggcgctgccatggccaccgagacatgcttcctgcaggactacatgggcgtgacggacacgggcagctcgtcgcagtggccacgcttctcgtcgtcggacacgataatggcggcggccgcggcgcgggcggcgacgacgcgggcgcccgagacgctccctctcttcccgacctgcggcgacgacggcggcagcggtagcagcagctacttgccgttctggggtgccgcgtccacaactgccggcgccacttcttccgttgcgatccagcagcaacaccagctgcaggagcagtacagcttttacagcaacagcaacagcacccagctggccggcaccggcaaccaagacgtatcggcaacagcagcagcagccgccgccctggagctgagcctcagctcatggtgctccccttaccctgctgcagggagtatgtgagagcaacgcgagctgccactgctcttcactggtaccgttaacagatcattcgacaaagcagcattagtccgttgatcggtggaagaccactcgtcagtgttgagttgaatgtttgatcaataaaatacggcaatgctgtaagggttgttttttatgccattgataatacactgtactgttcagttgttgaactctatttcttagccatgccaagtgcttttcttattttgaataacattacagcaaaaagttgaaagacaaaaaaaaaaacccccgaacagagtgctttgggtcccaagcttctttagactgtgttcggcgttccccctaaatttctccccctatatctcactcacttgtcacatcagcgttctctttccccctatatctccacgctctacagcagttccacctatatcaaacctctataccccaccacaacaatattatatactttcatcttcaactaactcatgtaccttccaatttttttctactaataattatttacgtgcacagaaacttagcaaggagagagagagcggggtgacccaccttgctagttggatattacctcttctcttcaaagtatccttgaacgctcaccggttatcaaatctctacactatagctctgtagtcttgctagatagttagttctttagctctcggtgaccaagcttggcgcgatcaagcttatcgataccgtcgacctcgaagcttggtcacccggtccgggcctagaaggccagcttcaagtttgtacaaaaaagcaggctccggccagaatggcccggaccgggttaccgaattcttaccctagctccctgcggctgttacgcggtcccccatcaatcttctgttcttgcggttgtagcctgtgtaacagtgctagagtatgtatgataaataggttttaagtctgcttacatgacattttttattgtggaagagacatataaaaattagagagagtggttctcatgcaacggcggacggcccggtgctaaaagagcttcaagacaaaataatgaaacaggaagagagtagatttatctaagagccaactttattatatgaatgtgtttattgttggctttagatgatatggtaaggagttagagctaataatagataggctctattattattattattaattaaactcgctctaaggaggaaagtgggaggaagggacgaggacgaagactactggaagcatcgtgcatggatgatggatgtggtgtctcttaatgtaggtggccggaggatgtacgtgttaattgcgcgataagcactcagatccaaccgcaaactacctccacactgacacactgatagagagaaagagagacctccgacgactgccgccgcagatgagccacgtacgtatacgacgtctgccggccggctcaggctgccgccatcaccctgctcgaaagtcgcgttaggcggcgccagctacataggagtatctagtctagccagttagtatactactactgcgctgatgatgaattaactctgcatagatactgtacttgcctccctccaacacccaaccacctcctgctcggctcttaataacttggacacggatcgatgccatccaaggaagaacacgacgacgacgacggaacatccaccatgcaagcttgcatccatacgccgatacgcgtgcatccatccatccaccattatttccattttccaccgatcacacgtacacaggcctatttaaggagcgacatcccactgcaactctcctcaccactcatcaccagctagctctagcaaagcacttgccatctaccgaccgccgcattccaaacagcccgacgagctagcagagcggcaggcacctccctcctcaaggaacccatggccactgtgaacaactggctcgctttctccctctccccgcaggagctgccgccctcccagacgacggactccacactcatctcggccgccaccgccgaccatgtctccggcgatgtctgcttcaacatcccccaagattggagcatgaggggatcagagctttcggcgctcgtcgcggagccgaagctggaggacttcctcggcggcatctccttctccgagcagcatcacaaggccaactgcaacatgatacccagcactagcagcacagtttgctacgcgagctcaggtgctagcaccggctaccatcaccagctgtaccaccagcccaccagctcagcgctccacttcgcggactccgtaatggtggcttcctcggccggtgtccacgacggcggtgccatgctcagcgcggccgccgctaacggtgtcgctggcgctgccagtgccaacggcggcggcatcgggctgtccatgattaagaactggctgcggagccaaccggcgcccatgcagccgagggtggcggcggctgagggcgcgcaggggctctctttgtccatgaacatggcggggacgacccaaggcgctgctggcatgccacttctcgctggagagcgcgcacgggcgcccgagagtgtatcgacgtcagcacagggtggagccgtcgtcgtcacggcgccgaaggaggatagcggtggcagcggtgttgccggcgctctagtagccgtgagcacggacacgggtggcagcggcggcgcgtcggctgacaacacggcaaggaagacggtggacacgttcgggcagcgcacgtcgatttaccgtggcgtgacaaggcatagatggactgggagatatgaggcacatctttgggataacagttgcagaagggaagggcaaactcgtaagggtcgtcaagtctatttaggtggctatgataaagaggagaaagctgctagggcttatgatcttgctgctctgaagtactggggtgccacaacaacaacaaattttccagtgagtaactacgaaaaggagctcgaggacatgaagcacatgacaaggcaggagtttgtagcgtctctgagaaggaagagcagtggtttctccagaggtgcatccatttacaggggagtgactaggcatcaccaacatggaagatggcaagcacggattggacgagttgcagggaacaaggatctttacttgggcaccttcagcacccaggaggaggcagcggaggcgtacgacatcgcggcgatcaagttccgcggcctcaacgccgtcaccaacttcgacatgagccgctacgacgtgaagagcatcctggacagcagcgccctccccatcggcagcgccgccaagcgcctcaaggaggccgaggccgcagcgtccgcgcagcaccaccacgccggcgtggtgagctacgacgtcggccgcatcgcctcgcagctcggcgacggcggagccctggcggcggcgtacggcgcgcactaccacggcgccgcctggccgaccatcgcgttccagccgggcgccgccagcacaggcctgtaccacccgtacgcgcagcagccaatgcgcggcggcgggtggtgcaagcaggagcaggaccacgcggtgatcgcggccgcgcacagcctgcaggacctccaccacctgaacctgggcgcggccggcgcgcacgactttttctcggcagggcagcaggccgccgccgctgcgatgcacggcctgggtagcatcgacagtgcgtcgctcgagcacagcaccggctccaactccgtcgtctacaacggcggggtcggcgacagcaacggcgccagcgccgtcggcggcagtggcggtggctacatgatgccgatgagcgctgccggagcaaccactacatcggcaatggtgagccacgagcaggtgcatgcacgggcctacgacgaagccaagcaggctgctcagatggggtacgagagctacctggtgaacgcggagaacaatggtggcggaaggatgtctgcatgggggactgtcgtgtctgcagccgcggcggcagcagcaagcagcaacgacaacatggccgccgacgtcgggcatggcggcgcgcagctcttcagtgtctggaacgacacttaagcgtacctagtggtacctgacatcttatagtctgcaacctctcgtgtctgaattcctatctttatcaagtgttattgcttccacgactataggacagctttcgtcgaaagcttttgctcatgtgatctcgaaggattcatctagtctgatttttcgtgacttgtatcggttttattggattcatccaacatatatcaataaaaaatgagttgtgtttcctttcttcctagttcagttaaaattatttccctcctgcgcttgtgctgtaattgtctgtgtacctgttgtttgtgactgtgttagttcccttggatatgatttcgtatttgatatgtacatggagatagcttagcttcattattggagtatgaagttagtatgacatagtcactctcctggaaaattgacactgcaaaccatatttttattctgaaccacaaatcctagtcagtccgctggcatatgccgtccgtttgctgaatccagaacgtgggtttggagatgtacggctgagatgcctctatgcgaaggggatttcgtggtgaaacgagatgggagtagagcaacgcccgtggaagatgcttcaaacttccacacttttgagcaacgatcggcagtagtaaggtagacgatttcaagatcaaagcatatgaagataaacaacatcaacaacaaaatttgttggggttctatagagagaaacagagctacatacatacactgttttgtatctaccatctgagatgatgaaaagatgaaaaactaaagaatgccccggcgccaacgccaggacacgccgcgcgcgcgtcacccgagccatctcttgacccagccggcgctgtatatttacacacgttgcagcatcgatcaccacctgttcgatcgcgtcgccgtcaccgggatctgagtcgaaacctagacttgtccatcttctggattggccaacttaattaatgtatgaaataaaaggatgcacacatagtgacatgctaatcactataatgtgggcatcaaagttgtgtgttatgtgtaattactagttatctgaataaaagagaaagagatcatccatatttcttatcctaaatgaatgtcacgtgtctttataattctttgatgaaccagatgcatttcattaaccaaatccatatacatataaatattaatcatatataattaatatcaattgggttagcaaaacaaatctagtctaggtgtgttttgcgaatgcgaccttcttatgtgcttctagtctccaaatgtggttgatagttattttgctctaagatcaacagtaatgaagtataaatcatcgttgtggtgtgctactcggttaattgagcattaacacacacaaacatgacgaggatggtataatctccaaaaatgtgtactttgttaggtgggaccctatagccttgattaatgtgctatgttaggcatgcctggaaacgtgtgacgcatatgttttgtgaacctgttgatattatatgtgcttttatattaccatattttattaaaatactaatatttattactagtaagatataacattctatctagcttaaaaactaaccataaatattccataataactagatttaccaaactaatatactaaatatacataataaatacaaaattaacaagacaataatcaatatttatgagcttaatatatttagacattatggttggtcgacgataatcatgctaacttttcgtaattgcttgattgaaatatgcttagaataatgcctctttgttctacatggcaaatagggaccattatggtgtaacaccctgggaaccacaaacaccccgaaatgctactaaactacacaactaaccttcatatataaaatttcgacagcatctcctttgaaaatttgcatagacgtggaagcaacagagtataaacagatatcatgataagaaaacatactagacattaataatctgctagaaatgggaagaatcctaacttgacgactgcgtaactgactagagtcacacttagctgaccctagtcacttacaactgacttcgtgtcctagatcgatgggcccggccgctctagaactagtggatcccccagcttgcatgcctgcagtgcagcgtgacccggtcgtgcccctctctagagataatgagcattgcatgtctaagttataaaaaattaccacatattttttttgtcacacttgtttgaagtgcagtttatctatctttatacatatatttaaactttactctacgaataatataatctatagtactacaataatatcagtgttttagagaatcatataaatgaacagttagacatggtctaaaggacaattgagtattttgacaacaggactctacagttttatctttttagtgtgcatgtgttctcctttttttttgcaaatagcttcacctatataatacttcatccattttattagtacatccatttagggtttagggttaatggtttttatagactaatttttttagtacatctattttattctattttagcctctaaattaagaaaactaaaactctattttagtttttttatttaataatttagatataaaatagaataaaataaagtgactaaaaattaaacaaataccctttaagaaattaaaaaaactaaggaaacatttttcttgtttcgagtagataatgccagcctgttaaacgccgtcgacgagtctaacggacaccaaccagcgaaccagcagcgtcgcgtcgggccaagcgaagcagacggcacggcatctctgtcgctgcctctggacccctctcgagagttccgctccaccgttggacttgctccgctgtcggcatccagaaattgcgtggcggagcggcagacgtgagccggcacggcaggcggcctcctcctcctctcacggcaccggcagctacgggggattcctttcccaccgctccttcgctttcccttcctcgcccgccgtaataaatagacaccccctccacaccctctttccccaacctcgtgttgttcggagcgcacacacacacaaccagatctcccccaaatccacccgtcggcacctccgcttcaaggtacgccgctcgtcctcccccccccccctctctaccttctctagatcggcgttccggtccatgcatggttagggcccggtagttctacttctgttcatgtttgtgttagatccgtgtttgtgttagatccgtgctgctagcgttcgtacacggatgcgacctgtacgtcagacacgttctgattgctaacttgccagtgtttctctttggggaatcctgggatggctctagccgttccgcagacgggatcgatttcatgattttttttgtttcgttgcatagggtttggtttgcccttttcctttatttcaatatatgccgtgcacttgtttgtcgggtcatcttttcatgcttttttttgtcttggttgtgatgatgtggtctggttgggcggtcgttctagatcggagtagaattctgtttcaaactacctggtggatttattaattttggatctgtatgtgtgtgccatacatattcatagttacgaattgaagatgatggatggaaatatcgatctaggataggtatacatgttgatgcgggttttactgatgcatatacagagatgctttttgttcgcttggttgtgatgatgtggtgtggttgggcggtcgttcattcgttctagatcggagtagaatactgtttcaaactacctggtgtatttattaattttggaactgtatgtgtgtgtcatacatcttcatagttacgagtttaagatggatggaaatatcgatctaggataggtatacatgttgatgtgggttttactgatgcatatacatgatggcatatgcagcatctattcatatgctctaaccttgagtacctatctattataataaacaagtatgttttataattattttgatcttgatatacttggatgatggcatatgcagcagctatatgtggatttttttagccctgccttcatacgctatttatttgcttggtactgtttcttttgtcgatgctcaccctgttgtttggtgttacttctgcaggtcgactctagaggatccatggcaccgaagaagaagcgcaaggtgatggacaagaagtacagcatcggcctcgacatcggcaccaactcggtgggctgggccgtcatcacggacgaatataaggtcccgtcgaagaagttcaaggtcctcggcaatacagaccgccacagcatcaagaaaaacttgatcggcgccctcctgttcgatagcggcgagaccgcggaggcgaccaggctcaagaggaccgccaggagacggtacactaggcgcaagaacaggatctgctacctgcaggagatcttcagcaacgagatggcgaaggtggacgactccttcttccaccgcctggaggaatcattcctggtggaggaggacaagaagcatgagcggcacccaatcttcggcaacatcgtcgacgaggtaagtttctgcttctacctttgatatatatataataattatcattaattagtagtaatataatatttcaaatatttttttcaaaataaaagaatgtagtatatagcaattgcttttctgtagtttataagtgtgtatattttaatttataacttttctaatatatgaccaaaacatggtgatgtgcaggtggcctaccacgagaagtacccgacaatctaccacctccggaagaaactggtggacagcacagacaaggcggacctccggctcatctaccttgccctcgcgcatatgatcaagttccgcggccacttcctcatcgagggcgacctgaacccggacaactccgacgtggacaagctgttcatccagctcgtgcagacgtacaatcaactgttcgaggagaaccccataaacgctagcggcgtggacgccaaggccatcctctcggccaggctctcgaaatcaagaaggctggagaaccttatcgcgcagttgccaggcgaaaagaagaacggcctcttcggcaaccttattgcgctcagcctcggcctgacgccgaacttcaaatcaaacttcgacctcgcggaggacgccaagctccagctctcaaaggacacctacgacgacgacctcgacaacctcctggcccagataggagaccagtacgcggacctcttcctcgccgccaagaacctctccgacgctatcctgctcagcgacatccttcgggtcaacaccgaaattaccaaggcaccgctgtccgccagcatgattaaacgctacgacgagcaccatcaggacctcacgctgctcaaggcactcgtccgccagcagctccccgagaagtacaaggagatcttcttcgaccaatcaaaaaacggctacgcgggatatatcgacggcggtgccagccaggaagagttctacaagttcatcaaaccaatcctggagaagatggacggcaccgaggagttgctggtcaagctcaacagggaggacctcctcaggaagcagaggaccttcgacaacggctccatcccgcatcagatccacctgggcgaactgcatgccatcctgcggcgccaggaggacttctacccgttcctgaaggataaccgggagaagatcgagaagatcttgacgttccgcatcccatactacgtgggcccgctggctcgcggcaactcccggttcgcctggatgacccggaagtcggaggagaccatcacaccctggaactttgaggaggtggtcgataagggcgctagcgctcagagcttcatcgagcgcatgaccaacttcgataaaaacctgcccaatgaaaaagtcctccccaagcactcgctgctctacgagtacttcaccgtgtacaacgagctcaccaaggtcaaatacgtcaccgagggcatgcggaagccggcgttcctgagcggcgagcagaagaaggcgatagtggacctcctcttcaagaccaacaggaaggtgaccgtgaagcaattaaaagaggactacttcaagaaaatagagtgcttcgactccgtggagatctcgggcgtggaggatcggttcaacgcctcactcggcacgtatcacgacctcctcaagatcattaaagacaaggacttcctcgacaacgaggagaacgaggacatcctcgaggacatcgtcctcaccctgaccctgttcgaggaccgcgaaatgatcgaggagaggctgaagacctacgcgcacctgttcgacgacaaggtcatgaaacagctcaagaggcgccgctacactggttggggaaggctgtcccgcaagctcattaatggcatcagggacaagcagagcggcaagaccatcctggacttcctcaagtccgacgggttcgccaaccgcaacttcatgcagctcattcacgacgactcgctcacgttcaaggaagacatccagaaggcacaggtgagcgggcagggtgactccctccacgaacacatcgccaacctggccggctcgccggccattaaaaagggcatcctgcagacggtcaaggtcgtcgacgagctcgtgaaggtgatgggccggcacaagcccgaaaatatcgtcatagagatggccagggagaaccagaccacccaaaaagggcagaagaactcgcgcgagcggatgaaacggatcgaggagggcattaaagagctcgggtcccagatcctgaaggagcaccccgtggaaaatacccagctccagaatgaaaagctctacctctactacctgcagaacggccgcgacatgtacgtggaccaggagctggacattaatcggctatcggactacgacgtcgaccacatcgtgccgcagtcgttcctcaaggacgatagcatcgacaacaaggtgctcacccggtcggataaaaatcggggcaagagcgacaacgtgcccagcgaggaggtcgtgaagaagatgaaaaactactggcgccagctcctcaacgcgaaactgatcacccagcgcaagttcgacaacctgacgaaggcggaacgcggtggcttgagcgaactcgataaggcgggcttcataaaaaggcagctggtcgagacgcgccagatcacgaagcatgtcgcccagatcctggacagccgcatgaatactaagtacgatgaaaacgacaagctgatccgggaggtgaaggtgatcacgctgaagtccaagctcgtgtcggacttccgcaaggacttccagttctacaaggtccgcgagatcaacaactaccaccacgcccacgacgcctacctgaatgcggtggtcgggaccgccctgatcaagaagtacccgaagctggagtcggagttcgtgtacggcgactacaaggtctacgacgtgcgcaaaatgatcgccaagtccgagcaggagatcggcaaggccacggcaaaatacttcttctactcgaacatcatgaacttcttcaagaccgagatcaccctcgcgaacggcgagatccgcaagcgcccgctcatcgaaaccaacggcgagacgggcgagatcgtctgggataagggccgggatttcgcgacggtccgcaaggtgctctccatgccgcaagtcaatatcgtgaaaaagacggaggtccagacgggcgggttcagcaaggagtccatcctcccgaagcgcaactccgacaagctcatcgcgaggaagaaggattgggacccgaaaaaatatggcggcttcgacagcccgaccgtcgcatacagcgtcctcgtcgtggcgaaggtggagaagggcaagtcaaagaagctcaagtccgtgaaggagctgctcgggatcacgattatggagcggtcctccttcgagaagaacccgatcgacttcctagaggccaagggatataaggaggtcaagaaggacctgattattaaactgccgaagtactcgctcttcgagctggaaaacggccgcaagaggatgctcgcctccgcaggcgagttgcagaagggcaacgagctcgccctcccgagcaaatacgtcaatttcctgtacctcgctagccactatgaaaagctcaagggcagcccggaggacaacgagcagaagcagctcttcgtggagcagcacaagcattacctggacgagatcatcgagcagatcagcgagttctcgaagcgggtgatcctcgccgacgcgaacctggacaaggtgctgtcggcatataacaagcaccgcgacaaaccaatacgcgagcaggccgaaaatatcatccacctcttcaccctcaccaacctcggcgctccggcagccttcaagtacttcgacaccacgattgaccggaagcggtacacgagcacgaaggaggtgctcgatgcgacgctgatccaccagagcatcacagggctctatgaaacacgcatcgacctgagccagctgggcggagacaagagaccacgggaccgccacgatggcgagctgggaggccgcaagcgggcaaggtaggtaccgttaacctagacttgtccatcttctggattggccaacttaattaatgtatgaaataaaaggatgcacacatagtgacatgctaatcactataatgtgggcatcaaagttgtgtgttatgtgtaattactagttatctgaataaaagagaaagagatcatccatatttcttatcctaaatgaatgtcacgtgtctttataattctttgatgaaccagatgcatttcattaaccaaatccatatacatataaatattaatcatatataattaatatcaattgggttagcaaaacaaatctagtctaggtgtgttttgcgaatgcggccgggctgcaggaattcgatagctttgagagtacaatgatgaacctagattaatcaatgccaaagtctgaaaaatgcaccctcagtctatgatccagaaaatcaagattgcttgaggccctgttcggttgttccggattagagccccggattaattcctagccggattacttctctaatttatatagattttgatgagctggaatgaatcctggcttattccggtacaaccgaacaggccctgaaggataccagtaatcgctgagctaaattggcatgctgtcagagtgtcagtattgcagcaaggtagtgagataaccggcatcatggtgccagtttgatggcaccattagggttagagatggtggccatgggcgcatgtcctggccaactttgtatgatatatggcagggtgaataggaaagtaaaattgtattgtaaaaagggatttcttctgtttgttagcgcatgtacaaggaatgcaagttttgagcgagggggcatcaaagatctggctgtgtttccagctgtttttgttagccccatcgaatccttgacataatgatcccgcttaaataagcaacctcgcttgtatagttccttgtgctctaacacacgatgatgataagtcgtaaaatagtggtgtccaaagaatttccaggcccagttgtaaaagctaaaatgctattcgaatttctactagcagtaagtcgtgtttagaaattatttttttatataccttttttccttctatgtacagtaggacacagtgtcagcgccgcgttgacggagaatatttgcaaaaaagtaaaagagaaagtcatagcggcgtatgtgccaaaaacttcgtcacagagagggccataagaaacatggcccacggcccaatacgaagcaccgcgacgaagcccaaacagcagtccgtaggtggagcaaagcgctgggtaatacgcaaacgttttgtcccaccttgactaatcacaagagtggagcgtaccttataaaccgagccgcaagcaccgaattgtacgtaacgtgcagtacgttttagagctagaaatagcaagttaaaataaggctagtccgttatcaacttgaaaaagtggcaccgagtcggtgctttttttttgcggccatcaagcttatcgataccgtcgacctcgagggggggcccggtacccagcttttgttccctttagtgagggttaattgcgcgcttggcgtaatcatggtggccgaagcttggtcacccggtccgggcctagaaggccagcttcaagtttgtacaaaaaagcaggctccggccagaatggcccggaccgggttaccgaattcgagctcggtaccctggtcacgtgcgtgtgtaactacagttcgcaaagcgacagaaggccaagacttgaagttttggccgggcgtcccgccatggcgacggcgagtcaacccgctgcccccacgcccaacggctacggcggtggtattttggctggcggagacggggtgcacgacactggcacggtgtcagatcagtctgggtcaccgtgagcctgtgtcgcagcactgctgctgttgcactgtggtagtgcggtggggctattgtcaaaggctcaaagcgtggctcggcagtcggcacccgcgcgatcagggcagccatcactcatcatcgcaggacatggcggtggagtggctacatagaaatctgtcctggtctgggcctgtgtagggtacgtacagctgaaatcagatccgccgcgtgtcaatttctgcttcgtttgacagtgtgtgcccacgccgcggagcgtgttcggtggcctttttcggcgttctagcggaatgggcgaccgcatttatcggctatgcttcattacataaaaccaaggctctgttttttagtacattagtagtaatgttcattgactgcgccgaactgtccgtatcatggcacagatgctcgttgatgacaacctcaacaggtggcagcgttacaacacgccatgcgacggtgtgttcccctcatgatgcgcaagttgcaggcagcaggtagcaaagcacatggttcactgggcacgaataggatgtttccatgccgacgtcctaatctcgtacagtacgtaatctctactacttaagtaagagtagtctaccattccatgttctatcaccattccctgttcttctgccattccttattctgcctctctcattcctattctctattctgcctttctcattcctcctccccgcacagcctatttccatattctgtcatttcctattctgcctttctcattccccctccccacaaagcatatttctattctcattcccgcgtacagcccacgtttagctaaaataaaaaaacacaaatgaccccaaagggattcaaacccgtgacctctcaaacaaatgcgagcagttgctaccgctacaccacatgtgtgtttatgtctacatctataacaggaaaaatatctactacatctctccccaaacctaccctactacccttgcacaatgcgtagtactagataagtatcatcgagattcttaaattatatttttagatggaatgagtaatatctaaagaagagccttgcatgcaatttcttttgtttgaataatgttttcaacttaaatttctttttttgcatgcgtggcatttattctccataatattttttccatggatctgacttgtgagtcattttcataaaccaacgccaaggataaatccatgtttcttgcttggaaaccacgaacaaacaccactagcaggaggcgctcacgttggcatcgctcatcgacgacgagaagaagcttgacgattgtcagttcgacctctggaagcagtcctacctggccgcatgaaccgctgtgtatgacaagctccgacacagccgccgcttggaatcggtccaaagcgactgcaccgcgttgtccatcgtcaagcagggggacctcatggttgttgccaacgtcggtgactctcgggttgttctgggcaccgcatccaacgacggagccatcacaccgtctagctcatcgtccatctgaagctcaacctgccatgtaagttgctactgaccggccataaattcttgtgcgctcggacgacggtcgttgctgatgttgtgtgagtgtcctcgaacatgatgtatgtagaggagtagcgcatccggtggtgcaacggtcaggtgtactaccttgctgatgaacccgaggtgcacttcatctggcagtccaaccaagagtcatcggcactcgacatgtcgcgcgcgttcgacgactactatactgtgacgtcatctcggcaccggaggtgacgcagaggaggaccgacatcaatgatcagttcttcatcctccccaccgtcggggtagctttttgtgctggtctgtctgtaattctctttacaaacacacacaattgctttttttgtttgagcaagcgcgtatggtggtacgtgcctgatgactgacgatgtacgagggaacttcttccggcaggcgtggggcatgctcaccaatgatgagaccatgaaaatcatggcatatatcgaagtcggtactgatggttgcaatgtagtggtgaaacaactagattaaaacaacaaaatttatgtatgaccagaatcacaaatagattatgaaacattttctcataacagtataacacacattttgtatataagttaccgtggtgttatatgtccccgttgcaacgcacgggcactcacctagtctatatagaaagaccctacaaagtagtacaaagactctattttattctggactcttccggatatacatgtacatgtgggccggcctggcccggcacggcacaggcccacaaaagcacggcccacaaaggcacggcccataaaagcacatatctaattatgggccgtgccgtgccagcacgtgtgcccagtcatcggcccacggcacggcccacaattagttatgtgtgccaggccggcccaaatagcccaaaataccttaatatgccagaccggctcatatacatacaacagtaatacatcaacaaaaagtaatatatatatatatatatatatatatatatatatatatatatgaccaaaataaaactaagatgttttatggatgcacattataaacctttggtcagaaagaaaaaaacaactagctcataaataatatttagttctctgtttagtgtttaattgagtactatacatccatacagaatacatatacaatgatcatcactattcactatccatatctaggtattggttctcgatggcttattgaagctctagattctccaaattatgctagtcatgtgggctttgacgaaccttagttaaatactgagtctatatttagtgggcctcggtgggccttagttaaatgggccgtgccaggccggcccgtgggcttgacatgaggcccaggcacggcccacaatgtgggccgtgccggcccaggcccacaattaggttgggccgtaccagatatgggtcgtgccagaaattgtatgattaggcacagcacaaatgtacacctatacttccggaatcccgaccatcccacggagccacctttcagaaccttccttcgccttccagaagcccacccgtcaccaccatataaaccgcccctgttcgcgtcggcattccccacaccgagaatcacaatacgaaacgaattaatccccaatcaacacagcaagtcagcaacaagcaaagcagcgacccgagagatgtccaacctgctcacggttcaccagaaccttccggctcttccagtggacgcgacgtccgatgaagtcaggaagaacctcatggacatgttccgcgacaggcaagcgttcagcgagcacacctggaagatgctgctctccgtctgccgctcctgggctgcatggtgcaagctgaacaacaggaagtggttccccgctgagcccgaggacgtgagggattaccttctgtacctgcaagcgcgaggtttgtttctgcttctacctttgatatatatataataattatcattaattagtagtaatataatatttcaaatatttttttcaaaataaaagaatgtagtatatagcaattgcttttctgtagtttataagtgtgtatattttaatttataacttttctaatatatgaccaaaacatggtgatgcctaggtctggcagtgaagaccatccagcaacaccttggacaactgaacatgcttcacaggcgctccggcctcccgcgccccagcgactcgaacgccgtgagcctcgtcatgcgccgcatcaggaaggaaaacgtcgatgccggcgaaagggcaaagcaggccctcgcgttcgagaggaccgatttcgaccaggtccgcagcctgatggagaacagcgacaggtgccaggacattaggaacctggcgttcctcggaattgcatacaacacgctcctcaggatcgcggaaattgcccgcattcgcgtgaaggacattagccgcaccgacggcggcaggatgcttatccacattggcaggaccaagacgctcgtttccaccgcaggcgtcgaaaaggccctcagcctcggagtgaccaagctcgtcgaacgctggatctccgtgtccggcgtcgcggacgacccaaacaactacctcttctgccgcgtccgcaagaacggggtggctgcccctagcgccaccagccaactcagcacgagggccttggaaggtattttcgaggccacccaccgcctgatctacggcgcgaaggatgacagcggtcaacgctacctcgcatggtccgggcactccgcccgcgttggagctgctagggacatggcccgcgccggtgtttccatccccgaaatcatgcaggcgggtggatggacgaacgtgaacattgtcatgaactacattcgcaaccttgacagcgagacgggcgcaatggttcgcctcctggaagatggtgactgaggtacccaacctagacttgtccatcttctggattggccaacttaattaatgtatgaaataaaaggatgcacacatagtgacatgctaatcactataatgtgggcatcaaagttgtgtgttatgtgtaattactagttatctgaataaaagagaaagagatcatccatatttcttatcctaaatgaatgtcacgtgtctttataattctttgatgaaccagatgcatttcattaaccaaatccatatacatataaatattaatcatatataattaatatcaattgggttagcaaaacaaatctagtctaggtgtgttttgcgatccgatatcgatgggccctggccgaagcttggtcacccggtccgggcctagaaggccgatctcccgggcacccagctttcttgtacaaagtggcggatagatggcgtctagcatatcgataggacatgacaagtggtacgatccccgtcacatgtccatggaggcatctgatatggacacggcgtgtatctatcgcggctggaacagaaccagcgctcgcgcggcggtcggcgggagggacagaccttggctccgtgcgttcaggttgtgcttgtgccgcgcgccacgcacggtctccgccgcctgcagctgaaattttagatttacatcctatccctttattttttttatttgtcacaattcagttcaaaaatgaagaacggaggtagtgcatcctttgtgagactaatgaaaatcacatctggatcctgaaatcggcgtcgtaacctacaaggccacggactggattagatagtggtccatggtgcataatgaggatcgagggataacttcgtatagcatacattatacgaagttatggcgccgctagcctgcagtgcagcgtgacccggtcgtgcccctctctagagataatgagcattgcatgtctaagttataaaaaattaccacatattttttttgtcacacttgtttgaagtgcagtttatctatctttatacatatatttaaactttactctacgaataatataatctatagtactacaataatatcagtgttttagagaatcatataaatgaacagttagacatggtctaaaggacaattgagtattttgacaacaggactctacagttttatctttttagtgtgcatgtgttctcctttttttttgcaaatagcttcacctatataatacttcatccattttattagtacatccatttagggtttagggttaatggtttttatagactaatttttttagtacatctattttattctattttagcctctaaattaagaaaactaaaactctattttagtttttttatttaataatttagatataaaatagaataaaataaagtgactaaaaattaaacaaataccctttaagaaattaaaaaaactaaggaaacatttttcttgtttcgagtagataatgccagcctgttaaacgccgtcgacgagtctaacggacaccaaccagcgaaccagcagcgtcgcgtcgggccaagcgaagcagacggcacggcatctctgtcgctgcctctggacccctctcgagagttccgctccaccgttggacttgctccgctgtcggcatccagaaattgcgtggcggagcggcagacgtgagccggcacggcaggcggcctcctcctcctctcacggcaccggcagctacgggggattcctttcccaccgctccttcgctttcccttcctcgcccgccgtaataaatagacaccccctccacaccctctttccccaacctcgtgttgttcggagcgcacacacacacaaccagatctcccccaaatccacccgtcggcacctccgcttcaaggtacgccgctcgtcctcccccccccccctctctaccttctctagatcggcgttccggtccatgcatggttagggcccggtagttctacttctgttcatgtttgtgttagatccgtgtttgtgttagatccgtgctgctagcgttcgtacacggatgcgacctgtacgtcagacacgttctgattgctaacttgccagtgtttctctttggggaatcctgggatggctctagccgttccgcagacgggatcgatttcatgattttttttgtttcgttgcatagggtttggtttgcccttttcctttatttcaatatatgccgtgcacttgtttgtcgggtcatcttttcatgcttttttttgtcttggttgtgatgatgtggtctggttgggcggtcgttctagatcggagtagaattctgtttcaaactacctggtggatttattaattttggatctgtatgtgtgtgccatacatattcatagttacgaattgaagatgatggatggaaatatcgatctaggataggtatacatgttgatgcgggttttactgatgcatatacagagatgctttttgttcgcttggttgtgatgatgtggtgtggttgggcggtcgttcattcgttctagatcggagtagaatactgtttcaaactacctggtgtatttattaattttggaactgtatgtgtgtgtcatacatcttcatagttacgagtttaagatggatggaaatatcgatctaggataggtatacatgttgatgtgggttttactgatgcatatacatgatggcatatgcagcatctattcatatgctctaaccttgagtacctatctattataataaacaagtatgttttataattattttgatcttgatatacttggatgatggcatatgcagcagctatatgtggatttttttagccctgccttcatacgctatttatttgcttggtactgtttcttttgtcgatgctcaccctgttgtttggtgttacttctgcaggtcgactttaacttagcctagggaagttcctattccgaagttcctattctctagaaagtataggaacttcagatccaccgggatccaccatggttgaacaagatggattgcacgcaggttctccggccgcttgggtggagaggctattcggctatgactgggcacaacagacaatcggctgctctgatgccgccgtgttccggctgtcagcgcaggggcgcccggttctttttgtcaagaccgacctgtccggtgccctgaatgaactgcaggacgaggcagcgcggctatcgtggctggccacgacgggcgttccttgcgcagctgtgctcgacgttgtcactgaagcgggaagggactggctgctattgggcgaagtgccggggcaggatctcctgtcatctcaccttgctcctgccgagaaagtatccatcatggctgatgcaatgcggcggctgcatacgcttgatccggctacctgcccattcgaccaccaagcgaaacatcgcatcgagcgagcacgtactcggatggaagccggtcttgtcgatcaggatgatctggacgaagagcatcaggggctcgcgccagccgaactgttcgccaggctcaaggcgcgcatgcccgacggcgatgatctcgtcgtgacccatggcgatgcctgcttgccgaatatcatggtggaaaatggccgcttttctggattcatcgactgtggccggctgggtgtggcggaccgctatcaggacatagcgttggctacccgtgatattgctgaagagcttggcggcgaatgggctgaccgcttcctcgtgctttacggtatcgccgctcccgattcgcagcgcatcgccttctatcgccttcttgacgagttcttctgaggatccaccatggttaacctagacttgtccatcttctggattggccaacttaattaatgtatgaaataaaaggatgcacacatagtgacatgctaatcactataatgtgggcatcaaagttgtgtgttatgtgtaattactagttatctgaataaaagagaaagagatcatccatatttcttatcctaaatgaatgtcacgtgtctttataattctttgatgaaccagatgcatttcattaaccaaatccatatacatataaatattaatcatatataattaatatcaattgggttagcaaaacaaatctagtctaggtgtgttttgcgaatgcggccctagcgtatacgaagttcctattccgaagttcctattcttcaaaaagtataggaacttcgaagttcctattccgaagttcctattctccagaaagtataggaacttctgtacacctgagctgattccgatgacttcgtaggttcctagctcaagccgctcgtgtccaagcgtcacttacgattagctaatgattacggcatctaggaccgactagctaactaactagtaccgaggccggccccgcgggagctcggcgcgccatgaggagcaatcattgttcaagacatgatgcaaagctagaaaactttgattgtggccgtcctaattgtgaagtttaggccggggggaacttcatgaaccctatcgaagcttaattagttcttttttgttgttagccatgtttgtattgtagtttaggtgaacaacatgacgccgcacccgcgatctcagggctcgtccccacacaggagggcacgtcgtcgtcttcgccgccgagcatcagagattcagagcacgtacacgcacatctcaagcaaacggagtagtacgtcctactcctacgtacatacctagccgacgacctttatgtgcacaccaccactgctctgctgcccggcctctccgtcgtccgttcatcaccagctggtctggtccttcaatttccatgcgtcggtccgcccggggattagaattaattcattccgattaatcgtggcctcttgctcttcaggatgaagagctatgtttaaacgtgcaagcgctactagacaattcagtacattaaaaacgtccgcaatgtgttattaagttgtctaagcgtcaatttgtttacaccacaatatatcctgccaccagccagccaacagctccccgaccggcagctcggcacaaaatcaccactcgatacaggcagcccatcagtccgggacggcc

SEQ ID NO: 349 - DNA, 4358 bp, synthetic construct
  misc_feature 1..4358: note = PHV00008
  source 1..4358: mol_type = other DNA
cgcggatagatggcgtctagcatatcgataggacatgacaagtggtacgatccccgtcacatgtccatggaggcatctgatatggacacggcgtgtatctatcgcggctggaacagaaccagcgctcgcgcggcggtcggcgggagggacagaccttggctccgtgcgttcaggttgtgcttgtgccgcgcgccacgcacggtctccgccgcctgcagctgaaattttagatttacatcctatccctttattttttttatttgtcacaattcagttcaaaaatgaagaacggaggtagtgcatcctttgtgagactaatgaaaatcacatctggatcctgaaatcggcgtcgtaacctacaaggccacggactggattagatagtggtccatggtgcataatgaggatcgagggataacttcgtatagcatacattatacgaagttatggcgccgctagcctgcagtgcagcgtgacccggtcgtgcccctctctagagataatgagcattgcatgtctaagttataaaaaattaccacatattttttttgtcacacttgtttgaagtgcagtttatctatctttatacatatatttaaactttactctacgaataatataatctatagtactacaataatatcagtgttttagagaatcatataaatgaacagttagacatggtctaaaggacaattgagtattttgacaacaggactctacagttttatctttttagtgtgcatgtgttctcctttttttttgcaaatagcttcacctatataatacttcatccattttattagtacatccatttagggtttagggttaatggtttttatagactaatttttttagtacatctattttattctattttagcctctaaattaagaaaactaaaactctattttagtttttttatttaataatttagatataaaatagaataaaataaagtgactaaaaattaaacaaataccctttaagaaattaaaaaaactaaggaaacatttttcttgtttcgagtagataatgccagcctgttaaacgccgtcgacgagtctaacggacaccaaccagcgaaccagcagcgtcgcgtcgggccaagcgaagcagacggcacggcatctctgtcgctgcctctggacccctctcgagagttccgctccaccgttggacttgctccgctgtcggcatccagaaattgcgtggcggagcggcagacgtgagccggcacggcaggcggcctcctcctcctctcacggcaccggcagctacgggggattcctttcccaccgctccttcgctttcccttcctcgcccgccgtaataaatagacaccccctccacaccctctttccccaacctcgtgttgttcggagcgcacacacacacaaccagatctcccccaaatccacccgtcggcacctccgcttcaaggtacgccgctcgtcctcccccccccccctctctaccttctctagatcggcgttccggtccatgcatggttagggcccggtagttctacttctgttcatgtttgtgttagatccgtgtttgtgttagatccgtgctgctagcgttcgtacacggatgcgacctgtacgtcagacacgttctgattgctaacttgccagtgtttctctttggggaatcctgggatggctctagccgttccgcagacgggatcgatttcatgattttttttgtttcgttgcatagggtttggtttgcccttttcctttatttcaatatatgccgtgcacttgtttgtcgggtcatcttttcatgcttttttttgtcttggttgtgatgatgtggtctggttgggcggtcgttctagatcggagtagaattctgtttcaaactacctggtggatttattaattttggatctgtatgtgtgtgccatacatattcatagttacgaattgaagatgatggatggaaatatcgatctaggataggtatacatgttgatgcgggttttactgatgcatatacagagatgctttttgttcgcttggttgtgatgatgtggtgtggttgggcggtcgttcattcgttctagatcggagtagaatactgtttcaaactacctggtgtatttattaattttggaactgtatgtgtgtgtcatacatcttcatagttacgagtttaagatggatggaaatatcgatctaggataggtatacatgttgatgtgggttttactgatgcatatacatgatggcatatgcagcatctattcatatgctctaaccttgagtacctatctattataataaacaagtatgttttataattattttgatcttgatatacttggatgatggcatatgcagcagctatatgtggatttttttagccctgccttcatacgctatttatttgcttggtactgtttcttttgtcgatgctcaccctgttgtttggtgttacttctgcaggtcgactttaacttagcctagggaagttcctattccgaagttcctattctctagaaagtataggaacttcagatccaccgggatccaccatggttgaacaagatggattgcacgcaggttctccggccgcttgggtggagaggctattcggctatgactgggcacaacagacaatcggctgctctgatgccgccgtgttccggctgtcagcgcaggggcgcccggttctttttgtcaagaccgacctgtccggtgccctgaatgaactgcaggacgaggcagcgcggctatcgtggctggccacgacgggcgttccttgcgcagctgtgctcgacgttgtcactgaagcgggaagggactggctgctattgggcgaagtgccggggcaggatctcctgtcatctcaccttgctcctgccgagaaagtatccatcatggctgatgcaatgcggcggctgcatacgcttgatccggctacctgcccattcgaccaccaagcgaaacatcgcatcgagcgagcacgtactcggatggaagccggtcttgtcgatcaggatgatctggacgaagagcatcaggggctcgcgccagccgaactgttcgccaggctcaaggcgcgcatgcccgacggcgatgatctcgtcgtgacccatggcgatgcctgcttgccgaatatcatggtggaaaatggccgcttttctggattcatcgactgtggccggctgggtgtggcggaccgctatcaggacatagcgttggctacccgtgatattgctgaagagcttggcggcgaatgggctgaccgcttcctcgtgctttacggtatcgccgctcccgattcgcagcgcatcgccttctatcgccttcttgacgagttcttctgaggatccaccatggttaacctagacttgtccatcttctggattggccaacttaattaatgtatgaaataaaaggatgcacacatagtgacatgctaatcactataatgtgggcatcaaagttgtgtgttatgtgtaattactagttatctgaataaaagagaaagagatcatccatatttcttatcctaaatgaatgtcacgtgtctttataattctttgatgaaccagatgcatttcattaaccaaatccatatacatataaatattaatcatatataattaatatcaattgggttagcaaaacaaatctagtctaggtgtgttttgcgaatgcggccctagcgtatacgaagttcctattccgaagttcctattcttcaaaaagtataggaacttcgaagttcctattccgaagttcctattctccagaaagtataggaacttctgtacacctgagctgattccgatgacttcgtaggttcctagctcaagccgctcgtgtccaagcgtcacttacgattagctaatgattacggcatctaggaccgactagctaactaactagtaccgaggccggccccgcgggagctcggcgcgccatgaggagcaatcattgttcaagacatgatgcaaagctagaaaactttgattgtggccgtcctaattgtgaagtttaggccggggggaacttcatgaaccctatcgaagcttaattagttcttttttgttgttagccatgtttgtattgtagtttaggtgaacaacatgacgccgcacccgcgatctcagggctcgtccccacacaggagggcacgtcgtcgtcttcgccgccgagcatcagagattcagagcacgtacacgcacatctcaagcaaacggagtagtacgtcctactcctacgtacatacctagccgacgacctttatgtgcacaccaccactgctctgctgcccggcctctccgtcgtccgttcatcaccagctggtctggtccttcaatttccatgcgtcggtccgcc

SEQ ID NO: 350 - DNA, 20 bp, synthetic construct
  misc_feature 1..20: note = PAM-CGG
  source 1..20: mol_type = other DNA
ggattccgcggaaatgggtg

SEQ ID NO: 351 - DNA, 19 bp, synthetic construct
  misc_feature 1..19: note = PAM-AGG
  source 1..19: mol_type = other DNA
gtcaaggacatacgagacc

SEQ ID NO: 352 - DNA, 9380 bp, synthetic construct
  misc_feature 1..9380: note = PHV00009
  source 1..9380: mol_type = other DNA
cagtgcagcgtgacccggtcgtgcccctctctagagataatgagcattgcatgtctaagttataaaaaattaccacatattttttttgtcacacttgtttgaagtgcagtttatctatctttatacatatatttaaactttactctacgaataatataatctatagtactacaataatatcagtgttttagagaatcatataaatgaacagttagacatggtctaaaggacaattgagtattttgacaacaggactctacagttttatctttttagtgtgcatgtgttctcctttttttttgcaaatagcttcacctatataatacttcatccattttattagtacatccatttagggtttagggttaatggtttttatagactaatttttttagtacatctattttattctattttagcctctaaattaagaaaactaaaactctattttagtttttttatttaataatttagatataaaatagaataaaataaagtgactaaaaattaaacaaataccctttaagaaattaaaaaaactaaggaaacatttttcttgtttcgagtagataatgccagcctgttaaacgccgtcgacgagtctaacggacaccaaccagcgaaccagcagcgtcgcgtcgggccaagcgaagcagacggcacggcatctctgtcgctgcctctggacccctctcgagagttccgctccaccgttggacttgctccgctgtcggcatccagaaattgcgtggcggagcggcagacgtgagccggcacggcaggcggcctcctcctcctctcacggcaccggcagctacgggggattcctttcccaccgctccttcgctttcccttcctcgcccgccgtaataaatagacaccccctccacaccctctttccccaacctcgtgttgttcggagcgcacacacacacaaccagatctcccccaaatccacccgtcggcacctccgcttcaaggtacgccgctcgtcctcccccccccccctctctaccttctctagatcggcgttccggtccatgcatggttagggcccggtagttctacttctgttcatgtttgtgttagatccgtgtttgtgttagatccgtgctgctagcgttcgtacacggatgcgacctgtacgtcagacacgttctgattgctaacttgccagtgtttctctttggggaatcctgggatggctctagccgttccgcagacgggatcgatttcatgattttttttgtttcgttgcatagggtttggtttgcccttttcctttatttcaatatatgccgtgcacttgtttgtcgggtcatcttttcatgcttttttttgtcttggttgtgatgatgtggtctggttgggcggtcgttctagatcggagtagaattctgtttcaaactacctggtggatttattaattttggatctgtatgtgtgtgccatacatattcatagttacgaattgaagatgatggatggaaatatcgatctaggataggtatacatgttgatgcgggttttactgatgcatatacagagatgctttttgttcgcttggttgtgatgatgtggtgtggttgggcggtcgttcattcgttctagatcggagtagaatactgtttcaaactacctggtgtatttattaattttggaactgtatgtgtgtgtcatacatcttcatagttacgagtttaagatggatggaaatatcgatctaggataggtatacatgttgatgtgggttttactgatgcatatacatgatggcatatgcagcatctattcatatgctctaaccttgagtacctatctattataataaacaagtatgttttataattattttgatcttgatatacttggatgatggcatatgcagcagctatatgtggatttttttagccctgccttcatacgctatttatttgcttggtactgtttcttttgtcgatgctcaccctgttgtttggtgttacttctgcaggtcgactctagaggatccatggcaccgaagaagaagcgcaaggtgatggacaagaagtacagcatcggcctcgacatcggcaccaactcggtgggctgggccgtcatcacggacgaatataaggtcccgtcgaagaagttcaaggtcctcggcaatacagaccgccacagcatcaagaaaaacttgatcggcgccctcctgttcgatagcggcgagaccgcggaggcgaccaggctcaagaggaccgccaggagacggtacactaggcgcaagaacaggatctgctacctgcaggagatcttcagcaacgagatggcgaaggtggacgactccttcttccaccgcctggaggaatcattcctggtggaggaggacaagaagcatgagcggcacccaatcttcggcaacatcgtcgacgaggtaagtttctgcttctacctttgatatatatataataattatcattaattagtagtaatataatatttcaaatatttttttcaaaataaaagaatgtagtatatagcaattgcttttctgtagtttataagtgtgtatattttaatttataacttttctaatatatgaccaaaacatggtgatgtgcaggtggcctaccacgagaagtacccgacaatctaccacctccggaagaaactggtggacagcacagacaaggcggacctccggctcatctaccttgccctcgcgcatatgatcaagttccgcggccacttcctcatcgagggcgacctgaacccggacaactccgacgtggacaagctgttcatccagctcgtgcagacgtacaatcaactgttcgaggagaaccccataaacgctagcggcgtggacgccaaggccatcctctcggccaggctctcgaaatcaagaaggctggagaaccttatcgcgcagttgccaggcgaaaagaagaacggcctcttcggcaaccttattgcgctcagcctcggcctgacgccgaacttcaaatcaaacttcgacctcgcggaggacgccaagctccagctctcaaaggacacctacgacgacgacctcgacaacctcctggcccagataggagaccagtacgcggacctcttcctcgccgccaagaacctctccgacgctatcctgctcagcgacatccttcgggtcaacaccgaaattaccaaggcaccgctgtccgccagcatgattaaacgctacgacgagcaccatcaggacctcacgctgctcaaggcactcgtccgccagcagctccccgagaagtacaaggagatcttcttcgaccaatcaaaaaacggctacgcgggatatatcgacggcggtgccagccaggaagagttctacaagttcatcaaaccaatcctggagaagatggacggcaccgaggagttgctggtcaagctcaacagggaggacctcctcaggaagcagaggaccttcgacaacggctccatcccgcatcagatccacctgggcgaactgcatgccatcctgcggcgccaggaggacttctacccgttcctgaaggataaccgggagaagatcgagaagatcttgacgttccgcatcccatactacgtgggcccgctggctcgcggcaactcccggttcgcctggatgacccggaagtcggaggagaccatcacaccctggaactttgaggaggtggtcgataagggcgctagcgctcagagcttcatcgagcgcatgaccaacttcgataaaaacctgcccaatgaaaaagtcctccccaagcactcgctgctctacgagtacttcaccgtgtacaacgagctcaccaaggtcaaatacgtcaccgagggcatgcggaagccggcgttcctgagcggcgagcagaagaaggcgatagtggacctcctcttcaagaccaacaggaaggtgaccgtgaagcaattaaaagaggactacttcaagaaaatagagtgcttcgactccgtggagatctcgggcgtggaggatcggttcaacgcctcactcggcacgtatcacgacctcctcaagatcattaaagacaaggacttcctcgacaacgaggagaacgaggacatcctcgaggacatcgtcctcaccctgaccctgttcgaggaccgcgaaatgatcgaggagaggctgaagacctacgcgcacctgttcgacgacaaggtcatgaaacagctcaagaggcgccgctacactggttggggaaggctgtcccgcaagctcattaatggcatcagggacaagcagagcggcaagaccatcctggacttcctcaagtccgacgggttcgccaaccgcaacttcatgcagctcattcacgacgactcgctcacgttcaaggaagacatccagaaggcacaggtgagcgggcagggtgactccctccacgaacacatcgccaacctggccggctcgccggccattaaaaagggcatcctgcagacggtcaaggtcgtcgacgagctcgtgaaggtgatgggccggcacaagcccgaaaatatcgtcatagagatggccagggagaaccagaccacccaaaaagggcagaagaactcgcgcgagcggatgaaacggatcgaggagggcattaaagagctcgggtcccagatcctgaaggagcaccccgtggaaaatacccagctccagaatgaaaagctctacctctactacctgcagaacggccgcgacatgtacgtggaccaggagctggacattaatcggctatcggactacgacgtcgaccacatcgtgccgcagtcgttcctcaaggacgatagcatcgacaacaaggtgctcacccggtcggataaaaatcggggcaagagcgacaacgtgcccagcgaggaggtcgtgaagaagatgaaaaactactggcgccagctcctcaacgcgaaactgatcacccagcgcaagttcgacaacctgacgaaggcggaacgcggtggcttgagcgaactcgataaggcgggcttcataaaaaggcagctggtcgagacgcgccagatcacgaagcatgtcgcccagatcctggacagccgcatgaatactaagtacgatgaaaacgacaagctgatccgggaggtgaaggtgatcacgctgaagtccaagctcgtgtcggacttccgcaaggacttccagttctacaaggtccgcgagatcaacaactaccaccacgcccacgacgcctacctgaatgcggtggtcgggaccgccctgatcaagaagtacccgaagctggagtcggagttcgtgtacggcgactacaaggtctacgacgtgcgcaaaatgatcgccaagtccgagcaggagatcggcaaggccacggcaaaatacttcttctactcgaacatcatgaacttcttcaagaccgagatcaccctcgcgaacggcgagatccgcaagcgcccgctcatcgaaaccaacggcgagacgggcgagatcgtctgggataagggccgggatttcgcgacggtccgcaaggtgctctccatgccgcaagtcaatatcgtgaaaaagacggaggtccagacgggcgggttcagcaaggagtccatcctcccgaagcgcaactccgacaagctcatcgcgaggaagaaggattgggacccgaaaaaatatggcggcttcgacagcccgaccgtcgcatacagcgtcctcgtcgtggcgaaggtggagaagggcaagtcaaagaagctcaagtccgtgaaggagctgctcgggatcacgattatggagcggtcctccttcgagaagaacccgatcgacttcctagaggccaagggatataaggaggtcaagaaggacctgattattaaactgccgaagtactcgctcttcgagctggaaaacggccgcaagaggatgctcgcctccgcaggcgagttgcagaagggcaacgagctcgccctcccgagcaaatacgtcaatttcctgtacctcgctagccactatgaaaagctcaagggcagcccggaggacaacgagcagaagcagctcttcgtggagcagcacaagcattacctggacgagatcatcgagcagatcagcgagttctcgaagcgggtgatcctcgccgacgcgaacctggacaaggtgctgtcggcatataacaagcaccgcgacaaaccaatacgcgagcaggccgaaaatatcatccacctcttcaccctcaccaacctcggcgctccggcagccttcaagtacttcgacaccacgattgaccggaagcggtacacgagcacgaaggaggtgctcgatgcgacgctgatccaccagagcatcacagggctctatgaaacacgcatcgacctgagccagctgggcggagacaagagaccacgggaccgccacgatggcgagctgggaggccgcaagcgggcaaggtaggtaccgttaacctagacttgtccatcttctggattggccaacttaattaatgtatgaaataaaaggatgcacacatagtgacatgctaatcactataatgtgggcatcaaagttgtgtgttatgtgtaattactagttatctgaataaaagagaaagagatcatccatatttcttatcctaaatgaatgtcacgtgtctttataattctttgatgaaccagatgcatttcattaaccaaatccatatacatataaatattaatcatatataattaatatcaattgggttagcaaaacaaatctagtctaggtgtgttttgcgaatgcggccaattcgtaatcatggtcatagctgtttcctgtgtgaaattgttatccgctcacaattccacacaacatacgagccggaagcataaagtgtaaagcctggggtgcctaatgagtgagctaactcacattaattgcgttgcgctcactgcccgctttccagtcgggaaacctgtcgtgccagctgcattaatgaatcggccaacgcgcggggagaggcggtttgcgtattgggcgctcttccgcttcctcgctcactgactcgctgcgctcggtcgttcggctgcggcgagcggtatcagctcactcaaaggcggtaatacggttatccacagaatcaggggataacgcaggaaagaacatgtgagcaaaaggccagcaaaaggccaggaaccgtaaaaaggccgcgttgctggcgtttttccataggctccgcccccctgacgagcatcacaaaaatcgacgctcaagtcagaggtggcgaaacccgacaggactataaagataccaggcgtttccccctggaagctccctcgtgcgctctcctgttccgaccctgccgcttaccggatacctgtccgcctttctcccttcgggaagcgtggcgctttctcatagctcacgctgtaggtatctcagttcggtgtaggtcgttcgctccaagctgggctgtgtgcacgaaccccccgttcagcccgaccgctgcgccttatccggtaactatcgtcttgagtccaacccggtaagacacgacttatcgccactggcagcagccactggtaacaggattagcagagcgaggtatgtaggcggtgctacagagttcttgaagtggtggcctaactacggctacactagaaggacagtatttggtatctgcgctctgctgaagccagttaccttcggaaaaagagttggtagctcttgatccggcaaacaaaccaccgctggtagcggtggtttttttgtttgcaagcagcagattacgcgcagaaaaaaaggatctcaagaagatcctttgatcttttctacggggtctgacgctcagtggaacgaaaactcacgttaagggattttggtcatgagattatcaaaaaggatcttcacctagatccttttaaattaaaaatgaagttttaaatcaatctaaagtatatatgagtaaacttggtctgacagttaccaatgcttaatcagtgaggcacctatctcagcgatctgtctatttcgttcatccatagttgcctgactccccgtcgtgtagataactacgatacgggagggcttaccatctggccccagtgctgcaatgataccgcgagacccacgctcaccggctccagatttatcagcaataaaccagccagccggaagggccgagcgcagaagtggtcctgcaactttatccgcctccatccagtctattaattgttgccgggaagctagagtaagtagttcgccagttaatagtttgcgcaacgttgttgccattgctacaggcatcgtggtgtcacgctcgtcgtttggtatggcttcattcagctccggttcccaacgatcaaggcgagttacatgatcccccatgttgtgcaaaaaagcggttagctccttcggtcctccgatcgttgtcagaagtaagttggccgcagtgttatcactcatggttatggcagcactgcataattctcttactgtcatgccatccgtaagatgcttttctgtgactggtgagtactcaaccaagtcattctgagaatagtgtatgcggcgaccgagttgctcttgcccggcgtcaatacgggataataccgcgccacatagcagaactttaaaagtgctcatcattggaaaacgttcttcggggcgaaaactctcaaggatcttaccgctgttgagatccagttcgatgtaacccactcgtgcacccaactgatcttcagcatcttttactttcaccagcgtttctgggtgagcaaaaacaggaaggcaaaatgccgcaaaaaagggaataagggcgacacggaaatgttgaatactcatactcttcctttttcaatattattgaagcatttatcagggttattgtctcatgagcggatacatatttgaatgtatttagaaaaataaacaaataggggttccgcgcacatttccccgaaaagtgccacctgacgtctaagaaaccattattatcatgacattaacctataaaaataggcgtatcacgaggccctttcgtcgcgcgtttcggtgatgacggtgaaaacctctgacacatgcagctcccggagacggtcacagcttgtctgtaagcggatgccgggagcagacaagcccgtcagggcgcgtcagcgggtgttggcgggtgtcggggctggcttaactatgcggcatcagagcagattgtactgagagtgcaccatatgcggtgtgaaataccgcacagatgcgtaaggagaaaataccgcatcaggcgccattcgccattcaggctgcgcaactgttgggaagggcgatcggtgcgggcctcttcgctattacgccagctggcgaaagggggatgtgctgcaaggcgattaagttgggtaacgccagggttttcccagtcacgacgttgtaaaacgacggccagtgccaagctcagatcagcttgcatgcctgcagg

SEQ ID NO: 353 - DNA, 3767 bp, synthetic construct
  misc_feature 1..3767: note = PHV00010
  source 1..3767: mol_type = other DNA
tgagagtacaatgatgaacctagattaatcaatgccaaagtctgaaaaatgcaccctcagtctatgatccagaaaatcaagattgcttgaggccctgttcggttgttccggattagagccccggattaattcctagccggattacttctctaatttatatagattttgatgagctggaatgaatcctggcttattccggtacaaccgaacaggccctgaaggataccagtaatcgctgagctaaattggcatgctgtcagagtgtcagtattgcagcaaggtagtgagataaccggcatcatggtgccagtttgatggcaccattagggttagagatggtggccatgggcgcatgtcctggccaactttgtatgatatatggcagggtgaataggaaagtaaaattgtattgtaaaaagggatttcttctgtttgttagcgcatgtacaaggaatgcaagttttgagcgagggggcatcaaagatctggctgtgtttccagctgtttttgttagccccatcgaatccttgacataatgatcccgcttaaataagcaacctcgcttgtatagttccttgtgctctaacacacgatgatgataagtcgtaaaatagtggtgtccaaagaatttccaggcccagttgtaaaagctaaaatgctattcgaatttctactagcagtaagtcgtgtttagaaattatttttttatataccttttttccttctatgtacagtaggacacagtgtcagcgccgcgttgacggagaatatttgcaaaaaagtaaaagagaaagtcatagcggcgtatgtgccaaaaacttcgtcacagagagggccataagaaacatggcccacggcccaatacgaagcaccgcgacgaagcccaaacagcagtccgtaggtggagcaaagcgctgggtaatacgcaaacgttttgtcccaccttgactaatcacaagagtggagcgtaccttataaaccgagccgcaagcaccgaattgtacgtaacgtgcagtacgttttagagctagaaatagcaagttaaaataaggctagtccgttatcaacttgaaaaagtggcaccgagtcggtgcttttttttacaattcgtaatcatggtcatagctgtttcctgtgtgaaattgttatccgctcacaattccacacaacatacgagccggaagcataaagtgtaaagcctggggtgcctaatgagtgagctaactcacattaattgcgttgcgctcactgcccgctttccagtcgggaaacctgtcgtgccagctgcattaatgaatcggccaacgcgcggggagaggcggtttgcgtattgggcgctcttccgcttcctcgctcactgactcgctgcgctcggtcgttcggctgcggcgagcggtatcagctcactcaaaggcggtaatacggttatccacagaatcaggggataacgcaggaaagaacatgtgagcaaaaggccagcaaaaggccaggaaccgtaaaaaggccgcgttgctggcgtttttccataggctccgcccccctgacgagcatcacaaaaatcgacgctcaagtcagaggtggcgaaacccgacaggactataaagataccaggcgtttccccctggaagctccctcgtgcgctctcctgttccgaccctgccgcttaccggatacctgtccgcctttctcccttcgggaagcgtggcgctttctcatagctcacgctgtaggtatctcagttcggtgtaggtcgttcgctccaagctgggctgtgtgcacgaaccccccgttcagcccgaccgctgcgccttatccggtaactatcgtcttgagtccaacccggtaagacacgacttatcgccactggcagcagccactggtaacaggattagcagagcgaggtatgtaggcggtgctacagagttcttgaagtggtggcctaactacggctacactagaaggacagtatttggtatctgcgctctgctgaagccagttaccttcggaaaaagagttggtagctcttgatccggcaaacaaaccaccgctggtagcggtggtttttttgtttgcaagcagcagattacgcgcagaaaaaaaggatctcaagaagatcctttgatcttttctacggggtctgacgctcagtggaacgaaaactcacgttaagggattttggtcatgagattatcaaaaaggatcttcacctagatccttttaaattaaaaatgaagttttaaatcaatctaaagtatatatgagtaaacttggtctgacagttaccaatgcttaatcagtgaggcacctatctcagcgatctgtctatttcgttcatccatagttgcctgactccccgtcgtgtagataactacgatacgggagggcttaccatctggccccagtgctgcaatgataccgcgagacccacgctcaccggctccagatttatcagcaataaaccagccagccggaagggccgagcgcagaagtggtcctgcaactttatccgcctccatccagtctattaattgttgccgggaagctagagtaagtagttcgccagttaatagtttgcgcaacgttgttgccattgctacaggcatcgtggtgtcacgctcgtcgtttggtatggcttcattcagctccggttcccaacgatcaaggcgagttacatgatcccccatgttgtgcaaaaaagcggttagctccttcggtcctccgatcgttgtcagaagtaagttggccgcagtgttatcactcatggttatggcagcactgcataattctcttactgtcatgccatccgtaagatgcttttctgtgactggtgagtactcaaccaagtcattctgagaatagtgtatgcggcgaccgagttgctcttgcccggcgtcaatacgggataataccgcgccacatagcagaactttaaaagtgctcatcattggaaaacgttcttcggggcgaaaactctcaaggatcttaccgctgttgagatccagttcgatgtaacccactcgtgcacccaactgatcttcagcatcttttactttcaccagcgtttctgggtgagcaaaaacaggaaggcaaaatgccgcaaaaaagggaataagggcgacacggaaatgttgaatactcatactcttcctttttcaatattattgaagcatttatcagggttattgtctcatgagcggatacatatttgaatgtatttagaaaaataaacaaataggggttccgcgcacatttccccgaaaagtgccacctgacgtctaagaaaccattattatcatgacattaacctataaaaataggcgtatcacgaggccctttcgtcgcgcgtttcggtgatgacggtgaaaacctctgacacatgcagctcccggagacggtcacagcttgtctgtaagcggatgccgggagcagacaagcccgtcagggcgcgtcagcgggtgttggcgggtgtcggggctggcttaactatgcggcatcagagcagattgtactgagagtgcaccatatgcggtgtgaaataccgcacagatgcgtaaggagaaaataccgcatcaggcgccattcgccattcaggctgcgcaactgttgggaagggcgatcggtgcgggcctcttcgctattacgccagctggcgaaagggggatgtgctgcaaggcgattaagttgggtaacgccagggttttcccagtcacgacgttgtaaaacgacggccagtgccaagctcagatcagcttgcatgcctgcagggg

SEQ ID NO: 354 - DNA, 7017 bp, synthetic construct
  misc_feature 1..7017: note = PHV00011
  source 1..7017: mol_type = other DNA
cggatagatggcgtctagcatatcgataggacatgacaagtggtacgatccccgtcacatgtccatggaggcatctgatatggacacggcgtgtatctatcgcggctggaacagaaccagcgctcgcgcggcggtcggcgggagggacagaccttggctccgtgcgttcaggttgtgcttgtgccgcgcgccacgcacggtctccgccgcctgcagctgaaattttagatttacatcctatccctttattttttttatttgtcacaattcagttcaaaaatgaagaacggaggtagtgcatcctttgtgagactaatgaaaatcacatctggatcctgaaatcggcgtcgtaacctacaaggccacggactggattagatagtggtccatggtgcataatgaggatcgagggataacttcgtatagcatacattatacgaagttatggcgccgctagcctgcagtgcagcgtgacccggtcgtgcccctctctagagataatgagcattgcatgtctaagttataaaaaattaccacatattttttttgtcacacttgtttgaagtgcagtttatctatctttatacatatatttaaactttactctacgaataatataatctatagtactacaataatatcagtgttttagagaatcatataaatgaacagttagacatggtctaaaggacaattgagtattttgacaacaggactctacagttttatctttttagtgtgcatgtgttctcctttttttttgcaaatagcttcacctatataatacttcatccattttattagtacatccatttagggtttagggttaatggtttttatagactaatttttttagtacatctattttattctattttagcctctaaattaagaaaactaaaactctattttagtttttttatttaataatttagatataaaatagaataaaataaagtgactaaaaattaaacaaataccctttaagaaattaaaaaaactaaggaaacatttttcttgtttcgagtagataatgccagcctgttaaacgccgtcgacgagtctaacggacaccaaccagcgaaccagcagcgtcgcgtcgggccaagcgaagcagacggcacggcatctctgtcgctgcctctggacccctctcgagagttccgctccaccgttggacttgctccgctgtcggcatccagaaattgcgtggcggagcggcagacgtgagccggcacggcaggcggcctcctcctcctctcacggcaccggcagctacgggggattcctttcccaccgctccttcgctttcccttcctcgcccgccgtaataaatagacaccccctccacaccctctttccccaacctcgtgttgttcggagcgcacacacacacaaccagatctcccccaaatccacccgtcggcacctccgcttcaaggtacgccgctcgtcctcccccccccccctctctaccttctctagatcggcgttccggtccatgcatggttagggcccggtagttctacttctgttcatgtttgtgttagatccgtgtttgtgttagatccgtgctgctagcgttcgtacacggatgcgacctgtacgtcagacacgttctgattgctaacttgccagtgtttctctttggggaatcctgggatggctctagccgttccgcagacgggatcgatttcatgattttttttgtttcgttgcatagggtttggtttgcccttttcctttatttcaatatatgccgtgcacttgtttgtcgggtcatcttttcatgcttttttttgtcttggttgtgatgatgtggtctggttgggcggtcgttctagatcggagtagaattctgtttcaaactacctggtggatttattaattttggatctgtatgtgtgtgccatacatattcatagttacgaattgaagatgatggatggaaatatcgatctaggataggtatacatgttgatgcgggttttactgatgcatatacagagatgctttttgttcgcttggttgtgatgatgtggtgtggttgggcggtcgttcattcgttctagatcggagtagaatactgtttcaaactacctggtgtatttattaattttggaactgtatgtgtgtgtcatacatcttcatagttacgagtttaagatggatggaaatatcgatctaggataggtatacatgttgatgtgggttttactgatgcatatacatgatggcatatgcagcatctattcatatgctctaaccttgagtacctatctattataataaacaagtatgttttataattattttgatcttgatatacttggatgatggcatatgcagcagctatatgtggatttttttagccctgccttcatacgctatttatttgcttggtactgtttcttttgtcgatgctcaccctgttgtttggtgttacttctgcaggtcgactttaacttagcctagggaagttcctattccgaagttcctattctctagaaagtataggaacttcagatccaccgggatccaccatggttgaacaagatggattgcacgcaggttctccggccgcttgggtggagaggctattcggctatgactgggcacaacagacaatcggctgctctgatgccgccgtgttccggctgtcagcgcaggggcgcccggttctttttgtcaagaccgacctgtccggtgccctgaatgaactgcaggacgaggcagcgcggctatcgtggctggccacgacgggcgttccttgcgcagctgtgctcgacgttgtcactgaagcgggaagggactggctgctattgggcgaagtgccggggcaggatctcctgtcatctcaccttgctcctgccgagaaagtatccatcatggctgatgcaatgcggcggctgcatacgcttgatccggctacctgcccattcgaccaccaagcgaaacatcgcatcgagcgagcacgtactcggatggaagccggtcttgtcgatcaggatgatctggacgaagagcatcaggggctcgcgccagccgaactgttcgccaggctcaaggcgcgcatgcccgacggcgatgatctcgtcgtgacccatggcgatgcctgcttgccgaatatcatggtggaaaatggccgcttttctggattcatcgactgtggccggctgggtgtggcggaccgctatcaggacatagcgttggctacccgtgatattgctgaagagcttggcggcgaatgggctgaccgcttcctcgtgctttacggtatcgccgctcccgattcgcagcgcatcgccttctatcgccttcttgacgagttcttctgaggatccaccatggttaacctagacttgtccatcttctggattggccaacttaattaatgtatgaaataaaaggatgcacacatagtgacatgctaatcactataatgtgggcatcaaagttgtgtgttatgtgtaattactagttatctgaataaaagagaaagagatcatccatatttcttatcctaaatgaatgtcacgtgtctttataattctttgatgaaccagatgcatttcattaaccaaatccatatacatataaatattaatcatatataattaatatcaattgggttagcaaaacaaatctagtctaggtgtgttttgcgaatgcggccctagcgtatacgaagttcctattccgaagttcctattcttcaaaaagtataggaacttcgaagttcctattccgaagttcctattctccagaaagtataggaacttctgtacacctgagctgattccgatgacttcgtaggttcctagctcaagccgctcgtgtccaagcgtcacttacgattagctaatgattacggcatctaggaccgactagctaactaactagtaccgaggccggccccgcgggagctcggcgcgccatgaggagcaatcattgttcaagacatgatgcaaagctagaaaactttgattgtggccgtcctaattgtgaagtttaggccggggggaacttcatgaaccctatcgaagcttaattagttcttttttgttgttagccatgtttgtattgtagtttaggtgaacaacatgacgccgcacccgcgatctcagggctcgtccccacacaggagggcacgtcgtcgtcttcgccgccgagcatcagagattcagagcacgtacacgcacatctcaagcaaacggagtagtacgtcctactcctacgtacatacctagccgacgacctttatgtgcacaccaccactgctctgctgcccggcctctccgtcgtccgttcatcaccagctggtctggtccttcaatttccatgcgtcggtccgacaattcgtaatcatggtcatagctgtttcctgtgtgaaattgttatccgctcacaattccacacaacatacgagccggaagcataaagtgtaaagcctggggtgcctaatgagtgagctaactcacattaattgcgttgcgctcactgcccgctttccagtcgggaaacctgtcgtgccagctgcattaatgaatcggccaacgcgcggggagaggcggtttgcgtattgggcgctcttccgcttcctcgctcactgactcgctgcgctcggtcgttcggctgcggcgagcggtatcagctcactcaaaggcggtaatacggttatccacagaatcaggggataacgcaggaaagaacatgtgagcaaaaggccagcaaaaggccaggaaccgtaaaaaggccgcgttgctggcgtttttccataggctccgcccccctgacgagcatcacaaaaatcgacgctcaagtcagaggtggcgaaacccgacaggactataaagataccaggcgtttccccctggaagctccctcgtgcgctctcctgttccgaccctgccgcttaccggatacctgtccgcctttctcccttcgggaagcgtggcgctttctcatagctcacgctgtaggtatctcagttcggtgtaggtcgttcgctccaagctgggctgtgtgcacgaaccccccgttcagcccgaccgctgcgccttatccggtaactatcgtcttgagtccaacccggtaagacacgacttatcgccactggcagcagccactggtaacaggattagcagagcgaggtatgtaggcggtgctacagagttcttgaagtggtggcctaactacggctacactagaaggacagtatttggtatctgcgctctgctgaagccagttaccttcggaaaaagagttggtagctcttgatccggcaaacaaaccaccgctggtagcggtggtttttttgtttgcaagcagcagattacgcgcagaaaaaaaggatctcaagaagatcctttgatcttttctacggggtctgacgctcagtggaacgaaaactcacgttaagggattttggtcatgagattatcaaaaaggatcttcacctagatccttttaaattaaaaatgaagttttaaatcaatctaaagtatatatgagtaaacttggtctgacagttaccaatgcttaatcagtgaggcacctatctcagcgatctgtctatttcgttcatccatagttgcctgactccccgtcgtgtagataactacgatacgggagggcttaccatctggccccagtgctgcaatgataccgcgagacccacgctcaccggctccagatttatcagcaataaaccagccagccggaagggccgagcgcagaagtggtcctgcaactttatccgcctccatccagtctattaattgttgccgggaagctagagtaagtagttcgccagttaatagtttgcgcaacgttgttgccattgctacaggcatcgtggtgtcacgctcgtcgtttggtatggcttcattcagctccggttcccaacgatcaaggcgagttacatgatcccccatgttgtgcaaaaaagcggttagctccttcggtcctccgatcgttgtcagaagtaagttggccgcagtgttatcactcatggttatggcagcactgcataattctcttactgtcatgccatccgtaagatgcttttctgtgactggtgagtactcaaccaagtcattctgagaatagtgtatgcggcgaccgagttgctcttgcccggcgtcaatacgggataataccgcgccacatagcagaactttaaaagtgctcatcattggaaaacgttcttcggggcgaaaactctcaaggatcttaccgctgttgagatccagttcgatgtaacccactcgtgcacccaactgatcttcagcatcttttactttcaccagcgtttctgggtgagcaaaaacaggaaggcaaaatgccgcaaaaaagggaataagggcgacacggaaatgttgaatactcatactcttcctttttcaatattattgaagcatttatcagggttattgtctcatgagcggatacatatttgaatgtatttagaaaaataaacaaataggggttccgcgcacatttccccgaaaagtgccacctgacgtctaagaaaccattattatcatgacattaacctataaaaataggcgtatcacgaggccctttcgtcgcgcgtttcggtgatgacggtgaaaacctctgacacatgcagctcccggagacggtcacagcttgtctgtaagcggatgccgggagcagacaagcccgtcagggcgcgtcagcgggtgttggcgggtgtcggggctggcttaactatgcggcatcagagcagattgtactgagagtgcaccatatgcggtgtgaaataccgcacagatgcgtaaggagaaaataccgcatcaggcgccattcgccattcaggctgcgcaactgttgggaagggcgatcggtgcgggcctcttcgctattacgccagctggcgaaagggggatgtgctgcaaggcgattaagttgggtaacgccagggttttcccagtcacgacgttgtaaaacgacggccagtgccaagctcagatcagcttgcatgcctgcagg
